(19) United States
(12) Patent Application Publication
(10) Pub. No.: US 2023/0227538 A1
(43) Pub. Date: Jul. 20, 2023

(54) SARS-COV2 NEUTRALIZING SINGLE DOMAIN ANTIBODY CONSTRUCTS

(71) Applicant: REGENTS OF THE UNIVERSITY OF CALIFORNIA, Oakland, CA (US)

(72) Inventors: Peter Walter, Oakland, CA (US); Aashish Manglik, Oakland, CA (US); Michael SCHOOF, Oakland, CA (US); Bryan FAUST, Oakland, CA (US); Nicholas HOPPE, Oakland, CA (US); Reuben SAUNDERS, Oakland, CA (US); Christian BILLESBOELLE, Oakland, CA (US)

(21) Appl. No.: 17/998,605

(22) PCT Filed: May 12, 2021
(86) PCT No.: PCT/US21/32092

§ 371 Date: Nov. 11, 2022

Related U.S. Application Data
(60) Provisional application No. 63/023,645, filed on May 12, 2020.
(60) Provisional application No. 63/042,135, filed on Jun. 22, 2020.
(60) Provisional application No. 63/047,655, filed on Jul. 2, 2020.
(60) Provisional application No. 63/061,928, filed on Aug. 6, 2020.

(51) Int. Cl. C07K 16/10; A61P 31/14

(52) U.S. Cl. CPC C07K 16/10; A61P 31/14; A61K 2039/505

(57) ABSTRACT

Antibodies, including single-domain antibodies, that bind to SARS-CoV2 virus and methods of treatment using single-do-main antibodies that bind to SARS-CoV2 virus are provided.

### I. BACKGROUND OF THE INVENTION

[0001] Severe acute respiratory syndrome coronavirus 2 or “SARS-CoV-2” is a virus strain that causes coronavirus disease 2019 (COVID-19). See, e.g., Gorbalenya A E, et al. Nature Microbiology. 5 (4): 536-544 (March 2020). Therapeutic treatments to address the global pandemic are needed.

### II. BRIEF DESCRIPTION OF THE DRAWINGS

[0002] FIGS. 1A and 1B depicts the general strategy for blocking the entry of the SARS-CoV2 virus (“SC2 virus”). As generally discussed herein, the spike protein of the SC2 virus forms a trimeric structure that binds to the extracellular domain of the ACE2 receptor on human cells at a location deemed the spike receptor binding domain (RBD). FIG. 1A depicts a space filling model and FIG. 1B uses a ribbon diagram. FIG. 1B shows that by blocking the ACE2—spike protein interaction, the SC2 virus can no longer enter the host cells.

[0003] FIGS. 2A, 2B and 2C show the validation of the correct structure for the spike trimeric antigen comprising residues extracellular domain (ECD) residues 1-1208, stabilizing mutations P986 and P987, a substitution for the furin cleavage site and a C-terminal trimerization motif (hereafter termed “spike ECD”). FIG. 2A shows a model of the structure of the SC2 spike ECD binding the human ACE2 receptor, showing the location of the RBD within the spike ECD. In contrast to other studies, the spike ECD was used to generate antigen binding domains (ABDs) in the present invention. FIG. 2B shows that using Cryogenic Electron Microscopy (“cryo-EM”) the correct trimeric spike protein ECD structure of the antigen was used herein. FIG. 2C depicts the antigen validation using a spike ECD-ACE2 binding assay, showing a K_{D} of 44 nM, a kₐ of 32.6×10⁵ M⁻¹s⁻¹ and a k_{d} of 0.012 s⁻¹.

[0004] FIG. 3 depicts the binding of a candidate MASC protein, “AeroNab6”, to SC2 spike ECD, that competes for binding to that is competitive with ACE2. MASC protein (monomer) was displayed on the surface of yeast by fusion to a HA-epitope tagged “stalk” protein that tethers the MASC protein to the yeast cell surface. Yeast displaying the MASC protein were incubated for 30 minutes at room temperature with 1 nM purified spike ECD labeled with Alexa 647 fluorophore (Spike-Alexa 647) and 10 μg/mL anti-HA Alexa488 antibody (12CA5) in assay buffer (20 mM HEPES pH 8.0, 150 mM sodium chloride, and 0.1% bovine serum albumin). Yeast were subsequently washed with assay buffer to remove unbound spike ECD and amount of spike ECD binding on the yeast surface was assessed by flow cytometry. Spike ECD binding was indicated by simultaneous presence of Alexa 647 and Alexa 488 fluorescence. To assess competition with ACE2, the assay above was repeated with 1.4 μM ACE2-Fc (a fusion protein comprising the ACE2 ECD to the human IgG1 Fc domain). A decrease in Alexa 647 fluorescence, corresponding to a loss of spike ECD binding, indicates that the MASC protein binds to spike ECD at an epitope that is competitive with ACE2.

[0005] FIGS. 4A and 4B depicts a schematic of the “up” and “down” conformations of the RBD domains of spike protein trimers. FIG. 4A shows a cryo-EM structure of the “down” or “off” position on the left and engaged with the ACE2 receptor in the “extended” or “on” position on the right. The RBD must be extended in order to engage the ACE2 receptor. FIG. 4B shows a cryo-EM structure at ˜3.0 Å resolution with a MASC protein monomer, AeroNab6, showing that the AeroNab6 MASC monomer binds to the “down” conformation of the Spike trimer on the left, thus preventing the binding of ACE2. On the right of FIG. 4B is a top view of the structure, showing three AeroNab6 monomers engaged on the Spike trimer. Additionally, this structure shows a minimal linker-length for a multimeric form of the AeroNab6 MASC protein that simultaneously binds more than one RBD. The distance between the N- and C-termini of individual AeroNab6 monomers bound to spike ECD in the “down” state is 51 Å. This requires ≥15 amino acids to bridge individual subunits to simultaneously engage multiple RBD monomers.

[0006] FIGS. 5A and 5B depict the mechanism of action of the MASC proteins of the invention. FIG. 5A shows that the AeroNab6 MASC protein engages with one RBD of the trimer using CDR1 and CDR2, and a second RBD of the trimer with CDR3. This is extremely effective in locking the RBD into the “off” position with extremely high affinity, as discussed further below. This structure also identifies the contact residues to facilitate affinity maturation. As further discussed below, AeroNab6 MASC makes extensive contacts within the ACE2 binding region of the SC2 spike RBD, including residues 446, 447, 449, 453, 455, 456, 483-486, 489-490, 493-496, 498, 501, and 505). The CDR3 of AeroNab6 MASC contacts a neighboring RBD on the SC2 spike at a three-dimensional epitope defined by residues 342, 343, 367, 371-375, 404, 436-441. This additional contact enables AeroNab6 MASC to locking the neighboring RBD in the “off” position, while simultaneously disrupting ACE2 binding at an adjacent RBD. FIG. 5B shows the overlap between the binding site of the AeroNab6 MASC molecule to the Spike protein with the binding site of ACE2 to the Spike protein. This overlap explains the fact that the AeroNab6 MASC monomer still blocks ACE2 from binding to monomeric RBDs.

[0007] FIGS. 6A, 6B and 6C depict the increase in potency as higher valency MASC proteins are made. FIG. 6A shows the monomeric AeroNab6 binding kinetics, with a KD of 210 nM. FIG. 6B shows the increase in binding affinity of the dimeric MASC fusion protein, and FIG. 6C shows the further increase of a trimeric MASC fusion protein. Further decrease in the dissociation kinetics between the dimeric and trimeric fusion proteins suggests engagement of all three SC2 spike RBDs by the trimeric MASC.

[0008] FIGS. 7A and 7B show affinity maturation of one MASC monomer, AeroNab6. FIG. 7A shows mutations were made in vhhCDR1 and vhhCDR2, which binds to a first RBD, and in vhhCDR3, which binds to a second RBD of the Spike trimer. FIG. 7B shows the binding kinectics of the parent protein, AeroNab6, and one of the affinity matured candidates, AeroNab6ₘ, as measured by surface plasmon resonance (SPR). For this particular antigen binding domain, there was a 500-fold enhancement of binding to the Spike protein.

[0009] FIGS. 8A, 8B and 8C show the increase in binding affinity of an affinity matured MASC protein candidate, AeroNab6m X 3. FIG. 8A is the parental AeroNab6, AeroNab6ₘ is an affinity matured protein and AeroNab6ₘX3 is the trimeric form, designed to bind to the trimeric Spike protein, as measured by SPR. Surprisingly and fortuitously, the trimeric AeroNab6ₘX3 disassociates from the Spike protein with a half-life of at least weeks. The theoretical dissociation half-life for AeroNab6ₘX3 predicted by the dissociation kinetics of the monomer and simultaneous engagement of three RBDs is >100 years.

[0010] FIGS. 9A, 9B and 9C depicts the successful humanization of the AeroNab6 MASC protein. FIG. 9A shows the starting kinetic parameters of the AeroNab6, with the llama framework regions shown in FIG. 9B. The CDRs are transplanted onto a human heavy chain framework (IGHV3-66) as shown in FIG. 9C. The humanized version, AeroNabh, has only two amino acid substitutions in the human IGHV3-66 sequence as shown in FIG. 17. As shown in FIG. 9D, the humanization substitutions do not cause significant loss of affinity for the Spike protein.

[0011] FIG. 10 depicts a pseudovirus neutralization assay, using infection of human ACE2-expressing HEK293 cells with a lentiviral construct containing the SARS-CoV2 Spike protein. As shown in the Figure, the trimeric MASC fusion proteins show higher neutralization than the MASC monomers. Additionally, the affinity matured MASC proteins show increased potency as well.

[0012] FIG. 11 shows a real viral neutralization assay, measuring inhibition of SARS-CoV2 infection of VeroE6 cells by the MASC test articles shown, with viral quantification after 72 hours. As shown, the trimeric MASC fusion proteins show higher neutralization than the MASC monomers. Additionally, the affinity matured MASC proteins show increased potency as well. Neutralization of authentic SARS-CoV2 was performed using a plaque reduction neutralization test. MASC proteins were serially diluted in culture medium and mixed with 100 μL of 500 TCID50 SARS-CoV2 for 1 hour. The mixture was added to VeroE6 cells and incubated for 1 hour, after which the cells were overlaid with a solid support to allow the development of plaques, which were quantified on day 3. The half maximal inhibitory concentrations (IC50) were determined using 3-parameter logistic regression.

[0013] FIG. 12 shows a table summarizing some of the data with a set of the MASC proteins indicated.

[0014] FIG. 13 depicts the sequences of some sdABDs in the original screening, including the CDRs and each framework, noting that FR2 in some of the original clones was also changed.

[0015] FIG. 14 depicts the full length sequences of the sdABDs of the MASC proteins corresponding to the clones in FIG. 13.

[0016] FIG. 15 depicts the framework backbone and the CDR sets for a number of different MASC protein of the invention.

[0017] FIG. 16 depicts the sdABD sequences of a number of MASC monomers based on the CDRs disclosed herein.

[0018] FIGS. 17A and 17B depicts some sequences of use in the invention. FIG. 17A depicts the sequence of the spike antigen used in the generation of the data herein and FIG. 17B is the sequence of the human ACE2 extracellular domain (ECD). The SC2 Spike ECD used for MASC protein identification used a construct encoding residues 1-1208 of SARS-Cov2 with proline substitutions at 986/987 and a substitution for the furin cleavage site (GSAS for residues 682-685). A C-terminal T4 fibritin trimerization motif was included, followed by a rhinovirus 3C protease cleavage site, an 8× histidine tag, and a Twin Strep Tag (as described in Wrapp et al Science 2020). The SC2 Spike ECD construct was expressed in either Expi293 or ExpiCHO cells (Thermo) per manufacturer instructions. SC2 Spike ECD was purified by a combination of metal affinity and size exclusion chromatography.

[0019] FIG. 18 depicts some sequences of particular use in the present invention. The CDRs are each underlined, and the junctions between the sdABDs and the linkers are shown as slashes (“/”).

[0020] FIG. 19 depicts the significant lyophilization stability of a trimeric MASC fusion protein, AeroNab6X3. Pre- and post-lyophilization measurements by either superdex S200 gel filtration or SPR analysis on the immobilized Spike protein show that the MASC fusion proteins of the invention can be lyophilized with no aggregation, denaturation or activity loss, in that binding is preserved.

[0021] FIGS. 20A, 20B and 20C shows the significant stability to aerosolization by a trimeric MASC fusion protein, AeroNab6X3. FIG. 18A shows an inexpensive nebulizer that creates 3.5 μm droplets. Using Superdex S200 gel filtration, the result show that the fusion protein is stable to aerosolization with no aggregation or denaturation comparing pre-aerosolization (FIG. 18B) and post-aerosolization (FIG. 18C).

[0022] FIG. 21 shows the significant increase in affinity achieved in Example 2. Yeast displaying nanobody variants of NbCOV6 were incubated with fluorescent SARS-Cov2 Spike receptor binding domain (RBD). The amount of RBD bound to the yeast cell surface was quantified by flow cytometry. The pool of affinity matured variants titrate with increased potency compared to the parent NbCOV6, indicative of higher affinity to the receptor binding domain.

[0023] FIG. 22 shows a comparison of the SPR affinities for the original parental anti-Spike MASC proteins measured using immobilized SC2 spike ECD.

[0024] FIG. 23 shows comparison of the SPR affinities for a number of MASC proteins and fusion proteins measured using immobilized SC2 spike ECD.

[0025] FIG. 24 shows the humanization strategy for AeroNab6, showing the close similarity of the parental clone for human IGHV3-66 sequence.

[0026] FIG. 25 shows useful CDR sets and the framework regions of the invention.

[0027] FIG. 26 shows the sequences of two dimeric MASC constructs using the AeroNab6mh sdABD and the NbCOV003 sdABD.

[0028] FIG. 27 shows data to support Example 4.

[0029] FIG. 28 shows data to support Example 4.

[0030] FIG. 29 shows data to support Example 4.

[0031] FIG. 30 shows data to support Example 4.

[0032] FIG. 31 shows data to support Example 4.

[0033] FIG. 32 shows the Cryo-EM workflow for Nb6. A flowchart representation of the classification workflow for Spike^{S2P}-Nb6 complexes yielding open and closed Spike^{S2P} conformations. From top to bottom, particles were template picked with a set of 20 Å low-pass filtered 2D backprojections of apo-Spike^{S2P} in the closed conformation. Extracted particles in 2D classes suggestive of various Spike^{S2P} views were subject to a round of heterogenous refinement in cryoSPARC with two naïve classes generated from a truncated Ab initio job, and a 20 Å low-pass filtered volume of apo-Spike^{S2P} in the closed conformation. Particles in the Spike^{S2P} 3D class were subject to 25 iterations of 3D classification into 6 classes without alignment in RELION, using the same input volume from cryoSPARC 3D classification, low pass filtered to 60 Å, T=8. Particles in classes representing the open and closed Spike^{S2P} conformations were imported into cisTEM for automatic refinement. Viewing distribution plots were generated with pyEM, and visualized with ChimeraX. Half maps from refinement were imported into cryoSPARC for local resolution estimation as shown in FIG. S3.

[0034] FIG. 33 shows the Cryo-EM workflow for Nb11. Classification workflow for Spike^{S2P}-Nb11 complexes yielding open and closed Spike^{S2P} conformations. Particles were template picked from two separate collections with a set of 20 Å low-pass filtered 2D backprojections of apo-Spike^{S2P} in the closed conformation. Extracted particles were Fourier cropped to 128 pixels prior to extensive heterogenous refinement in cryoSPARC, using a 20 Å low-pass filtered volume of apo-Spike^{S2P} in the closed conformation and additional naïve classes for removal of non-Spike^{S2P} particles. After cryoSPARC micrograph curation and heterogenous refinement, Spike^{S2P} density corresponding to all regions outside of the ACE2 RBD::Nanobody interface were subtracted. A mask around the ACE2 RBD::Nanobody interface was generated, and used for multiple rounds of 3D classification without alignment in RELION. Particles in classes representing open and closed Spike^{S2P} conformations were selected, unsubtracted and unbinned prior to refinement in RELION. Viewing distribution plots were generated with pyEM, and visualized with ChimeraX. Half maps from refinement were imported into cryoSPARC for local resolution estimation as shown in FIG. S3.

[0035] FIG. 34 shows resolution of cryo-EM maps and models. A. Local resolution estimates of Spike^{S2P} complexes as generated in cryoSPARC. All maps (except mNb6) are shown with the same enclosed volume. All maps are colored on the same scale, as indicated. B. Gold standard Fourier Shell Correlation (GSFSC) plots for cryo-EM maps calculated within cryoSPARC. Resolution values in parentheses represent values at FSC=0.143 (dashed line). C. Model-map correlation calculated in Phenix. Resolution values in parentheses represent values at FSC=0.5 (dashed line).

[0036] FIG. 35 shows modeling of distances for multimeric nanobody design. A. Model of Spike^{S2P}:Nb6 complex in the closed state. The minimal distance between adjacent Nb6 N- and C-termini is 52 Å (dashed line). B. Model of Spike^{S2P}:Nb6 complex in the open state with Nb6 docked into the cryo-EM density for up-state RBD. Minimal distance between N- and C-termini of both nanobodies is 72 Å. Nb6 cannot bind RBD2 in open Spike^{S2P}, as this would sterically clash with RBD3. C. Model of Spike^{S2P}:Nb11 complex in the closed state. The minimal distance between adjacent Nb6 N- and C-termini is 71 Å (dashed line). D. of Spike^{S2P}:Nb11 complex in the open state. The minimal distance between adjacent Nb6 N- and C-termini is 68 Å between Nb 11 bound to RBD2 in the down-state and RBD3 in the up-state. For B, the model of Nb6 from A was docked into the cryo-EM map to enable modeling of distance between N- and C-termini. For C and D, a generic nanobody was docked into cryo-EM maps to model the distance between N- and C-termini.

[0037] FIG. 36 shows radiolytic hydroxyl radical footprinting of Spike^{S2P}. A. Change in oxidation rate between Spike^{S2P} and Nb3-Spike^{S2P} complexes at all residues. A cluster of highly protected residues in the Spike^{S2P}-Nb3 complex is observed in the N-terminal domain. B. Oxidation rate plots of the two (M177, H207) most heavily protected residues upon Nb3 binding to Spike^{S2P}. Data points labeled with an asterisk are excluded from rate calculations as these values fall outside of the first order reaction, likely due to extensive oxidation-mediated damage. C. Change in oxidation rate mapped onto Spike in the all RBD down conformation.

[0038] FIG. 37 shows multivalent Nb3 construct inhibits Spike^{S2P}:ACE2 interaction. A. SPR experiments with immobilized Spike^{S2P} show that Nb3 and monovalent ACE2 can bind Spike^{S2P} simultaneously. The order of Nb3 and monovalent ACE2 does not affect the binding of the second reagent. Nb3 therefore does not inhibit Spike^{S2P} binding to monovalent ACE2. B. Nanobody inhibition of 1 nM Spike^{S2P}-Alexa 647 binding to ACE2 expressing HEK293T cells by either monovalent or trivalent Nb3. n=2 biological replicates for Nb3-tri. All error bars represent s.e.m.

[0039] FIG. 38 shows CryoEM workflow for mNb6. Classification workflow for the Spike^{S2P}-mNb6 complex yielding a closed Spike^{S2P} conformation. From top to bottom, particles were template picked from two separate collections with a set of 20 Å low-pass filtered 2D backprojections of apo-Spike^{S2P} in the closed conformation. Extracted particles were Fourier cropped to 96 pixels prior to 2D classification. Particles in Spike^{S2P} 2D classes were selected for a round of heterogeneous refinement in cryoSPARC using a 20 Å low-pass filtered volume of apo-Spike^{S2P} in the closed conformation and additional naïve classes for removal of non-Spike^{S2P} particles. In RELION, particles in the Spike^{S2P} 3D class were subject to two rounds of 3D classification without alignment into 6 classes using the same input volume from cryoSPARC 3D classification, low pass filtered to 60 Å, T=8. Unbinned particles in the Spike^{S2P}-closed conformation were exported into cisTEM for automatic refinement, followed by local refinement using a mask around the RBD::Nanobody interface. Viewing distribution plots were generated with pyEM, and visualized with ChimeraX. Half maps from refinement were imported into cryoSPARC for local resolution estimation as shown in FIG. S3.

[0040] FIG. 39 shows mNb6 and Nb3-tri are additive for viral neutralization. Inhibition of pseudotyped lentivirus infection of ACE2 expressing HEK293T cells by mNb6 with increasing concentrations of Nb3-tri. mNb6 neutralization is additive with Nb3-tri, as demonstrated by inhibitory activity at a sub-saturating dose of Nb3-tri. However, the potency of mNb6 is unchanged by Nb3-tri, suggesting no synergistic effect on viral neutralization.

[0041] FIG. 40 shows stability of Nb6 and its derivatives. A. Thermal denaturation of nanobodies assessed by circular dichroism measurement of molar ellipticity at 204 nm. Apparent melting temperatures (Tₘ) for each nanobody are indicated. B. Nanobody inhibition of 1 nM Spike^{S2P}-Alexa 647 binding to ACE2 expressing HEK293T cells after incubation at either 25° C. or 50° C. for 1 hour or after aerosolization. C. Inhibition of pseudotyped lentivirus infection of ACE2 expressing HEK293T cells by mNb6-tri after aerosolization, lyophilization, or heat treatment at 50° C. for 1 hour.

[0042] FIG. 41 shows nanobody affinities and efficacies in neutralization assays. aAverage values from n=5 biological replicates for Nb6, Nb11, Nb15, Nb19 are presented, all others were tested with n=3 biological replicates.bAverage values from n=2 biological replicates for Nb12, Nb17, and Nb11-tri are presented, all others were tested with n=3 biological replicates. cAverage values from n=2 biological replicates for Nb3, Nb3-bi, and Nb3-tri. n=3 biological replicates for all others. dNb3, Nb17, and Nb18 expresses at 41.3, 4.0, and 2.2 milligrams per liter of E. coli culture, respectively. Nb3 is monodisperse on size exclusion chromatography over a GE S200 Increase 10×300 column, while Nb17 and Nb18 are polydisperse. NB—no binding. NC—no competition. NP—not performed.

[0043] FIG. 42 shows Cryo-electron microscopy data collection and refinement statistics.

[0044] FIG. 43 shows X-ray crystallography data collection and refinement statistics.

[0045] FIG. 44 shows X-ray crystallography data collection and refinement statistics. ^{a} Values in parentheses correspond to the highest resolution shell. ^{b} R_{merge}=Σ|I−<I>I/ΣI.

[0046] FIG. 45 shows nanobody expression plasmids.

[0047] FIG. 46 shows Biophysical stability of AeroNab6mhx3. AeroNab6mhx3 is resistant to thermal denaturation. Circular dichroism of AeroNabs measured over increasing temperatures shows loss of beta-sheet character at 204 nm. Melting temperatures (Tm) were calculated as loss of 50% signal.

[0048] FIG. 47 shows the structure of Spike bound to mNb6. Cryo-EM structure of mNb6 bound to Spike shows stabilization of closed Spike conformation.

[0049] FIG. 48 shows mNb6 X-Ray Structure (apo- and Spike-bound). CDR1 and CDR3 bind by an adaptive fit mechanism.

[0050] FIG. 49 shows other nanobodies from primary screen.

[0051] FIG. 50 shows AeroNab3 targets an allosteric epitope. Inhibition of SARS-CoV2 infection of VeroE6 cells by indicated dose of AeroNab constructs. Viral plaques were quantified after 72 hours. AeroNab3 targets a unique epitope on Spike to neutralize viral infection.

[0052] FIG. 51 shows the Experimental Design of a Transmission Study for Example 5.

[0053] FIG. 52 shows the Experimental Design of an Efficacy Study for Example 5.

[0054] FIG. 53 shows lung virus titers of golden Syrian hamsters after treatment with Nanoparticle A prior to cohabitation with SARS-CoV-2-infected animals as described in Example 5.

[0055] FIG. 54 shows oropharyngeal swab virus titers of golden Syrian hamsters after treatment with Nanoparticle A prior to cohabitation with SARS-CoV-2-infected animals as described in Example 5.

[0056] FIG. 55 shows lung virus titers of golden Syrian hamsters treated with Nanoparticle A and infected with SARS-CoV-2 as described in Example 5.

[0057] FIG. 56 shows oropharyngeal swab virus titers of golden Syrian hamsters treated with Nanoparticle A and infected with SARS-CoV-2 as described in Example 5.

[0058] FIG. 57 shows for the Transmission Study the percent initial body weight of 5-week-old golden Syrian hamsters following challenge with SARS-CoV-2 and treatment with Nanoparticle A prior to cohabitation with infected animals. (n=4 hamsters/infected group, n=8 hamsters/naïve group) Animals with the same shape symbols were cohabitated. Groups represented with the closed circle and closed square were infected on study day 0. Animals represented by the open circle were naïve and placebo-treated prior to cohabitation with animals from group 1 for 4 hrs per day for 3 days. Animals represented by the open square were naïve and Nanoparticle A-treated prior to cohabitation with animals from group 3. The differences in percent initial body weight were not statistically significant when compared by one-way ANOVA.

[0059] FIG. 58 shows for the Transmission Study outlined in Example 5, the lung virus titers of 5-week-old golden Syrian hamsters after challenge with SARS-CoV-2 and treatment with Nanoparticle A prior to cohabitation with infected animals. Animals with the same shape symbols were cohabitated. Groups represented with the closed circle and closed square were infected on study day 0. Animals represented by the open circle were naïve and placebo-treated prior to cohabitation with animals from group 1 for 4 hrs per day for 3 days. Animals represented by the open square were naïve and Nanoparticle A-treated prior to cohabitation with animals from group 3. Treatment with Nanoparticle A significantly reduced lung virus titers in naïve animals cohabitated with SARS-CoV-2-infected animals.

[0060] FIG. 59 shows for the Transmission Study outlined in Example 5, the lung weights of 5-week-old golden Syrian hamsters after challenge with SARS-CoV-2 and treatment with Nanoparticle A prior to cohabitation with infected animals. Animals with the same shape symbols were cohabitated. Groups represented with the closed circle and closed square were infected on study day 0. Animals represented by the open circle were naïve and placebo-treated prior to cohabitation with animals from group 1 for 4 hrs per day for 3 days. Animals represented by the open square were naïve and Nanoparticle A-treated prior to cohabitation with animals from group 3. Lung weights were not statistically different between groups when compared by one-way ANOVA.

[0061] FIG. 60 shows for the Transmission Study in Example 5, oropharyngeal swab virus titers of 5- week-old golden Syrian hamsters after challenge with SARS-CoV-2 and treatment with Nanoparticle A prior to cohabitation with infected animals. Animals with the same shape symbols were cohabitated. Groups represented with the closed circle and closed square were infected on study day 0. Animals represented by the open circle were naïve and placebo-treated prior to cohabitation with animals from group 1 for 4 hrs per day for 3 days. Animals represented by the open square were naïve and Nanoparticle A-treated prior to cohabitation with animals from group 3. No significant difference in oropharyngeal swab virus titers were determined by one-way ANOVA.

[0062] FIG. 61 shows for the Efficacy Study in Example 5, the percent initial body weight of 5-week-old golden Syrian hamsters following treatment with Nanoparticle A and infection with SARS-CoV-2. (n=8 hamsters/group) Treatment with Nanoparticle A started 2 hours prior to infection. The differences in percent initial body weight were not statistically significant when compared by one-way ANOVA.

[0063] FIG. 62 shows the lung virus titers of 5-week-old golden Syrian hamsters after treatment with Nanoparticle A and infection with SARS-CoV-2. Treatment with Nanoparticle A started significantly reduced lung virus titers at doses of 2 and 0.63 mg/kg/d compared to placebo-treated animals. (**P<0.01 compared to placebo-treated animals.)

[0064] FIG. 63 shows the lung weights of 5-week-old golden Syrian hamsters after challenge with SARS-CoV-2 and treatment with Nanoparticle A prior to cohabitation with infected animals. Lung weights were not statistically different between groups when compared by one-way ANOVA.

[0065] FIG. 64 shows for the Efficacy Study in Example 5, oropharyngeal swab virus titers of 5-week-old golden Syrian hamsters after treatment with Nanoparticle A and infection with SARS-CoV-2. Treatment with Nanoparticle A at a dose of 2 mg/kg/d significantly reduced oropharyngeal swab titers of hamsters infected with SARS-CoV-2. (*P<0.05 compared to placebo-treated animals.)

### III. DETAILED DESCRIPTION OF THE INVENTION

[0066] A. Definitions

[0067] By “amino acid” and “amino acid identity” as used herein is meant one of the 20 naturally occurring amino acids or any non-natural analogues that may be present at a specific, defined position. In many embodiments, “amino acid” means one of the 20 naturally occurring amino acids. By “protein” herein is meant at least two covalently attached amino acids, which includes proteins, polypeptides, oligopeptides and peptides.

[0068] By “amino acid modification” herein is meant an amino acid substitution, insertion, and/or deletion in a polypeptide sequence or an alteration to a moiety chemically linked to a protein. For example, a modification may be an altered carbohydrate or PEG structure attached to a protein. For clarity, unless otherwise noted, the amino acid modification is always to an amino acid coded for by DNA, e.g. the 20 amino acids that have codons in DNA and RNA. The preferred amino acid modification herein is a substitution.

[0069] By “amino acid substitution” or “substitution” herein is meant the replacement of an amino acid at a particular position in a parent polypeptide sequence with a different amino acid. In particular, in some embodiments, the substitution is to an amino acid that is not naturally occurring at the particular position, either not naturally occurring within the organism or in any organism. For clarity, a protein which has been engineered to change the nucleic acid coding sequence but not change the starting amino acid (for example exchanging CGG (encoding arginine) to CGA (still encoding arginine) to increase host organism expression levels) is not an “amino acid substitution”; that is, despite the creation of a new gene encoding the same protein, if the protein has the same amino acid at the particular position that it started with, it is not an amino acid substitution.

[0070] By “amino acid insertion” or “insertion” as used herein is meant the addition of an amino acid sequence at a particular position in a parent polypeptide sequence.

[0071] By “amino acid deletion” or “deletion” as used herein is meant the removal of an amino acid sequence at a particular position in a parent polypeptide sequence.

[0072] The polypeptides of the invention specifically bind to the Spike trimeric protein as outlined herein. “Specific binding” or “specifically binds to” or is “specific for” a particular antigen or an epitope means binding that is measurably different from a non-specific interaction. Specific binding can be measured, for example, by determining binding of a molecule compared to binding of a control molecule, which generally is a molecule of similar structure that does not have binding activity. For example, specific binding can be determined by competition with a control molecule that is similar to the target.

[0073] Specific binding for a particular antigen or an epitope can be exhibited, for example, by an antigen binding domain (SBD) having a KD for an antigen or epitope of at least about 10⁻⁴ M, at least about 10⁻⁵ M, at least about 10⁻⁶ M, at least about 10⁻⁷ M, at least about 10⁻⁸ M, at least about 10⁻⁹ M, alternatively at least about 10⁻¹⁰ M, at least about 10⁻¹¹ M, at least about 10⁻¹² M, at least about 10⁻¹³ M, at least about 10⁻¹⁴ M, at least about 10⁻¹⁵ M or greater, where KD refers to a dissociation rate of a particular ABD-antigen interaction. Typically, an ABD that specifically binds an antigen will have a KD that is 20-, 50-, 100-, 500-, 1000-, 5,000-, 10,000- or more times greater for a control molecule relative to the antigen or epitope.

[0074] Also, specific binding for a particular antigen or an epitope can be exhibited, for example, by an antibody having a KA or Ka for an antigen or epitope of at least 20-, 50-, 100-, 500-, 1000-, 5,000-, 10,000- or more times greater for the epitope relative to a control, where KA or Ka refers to an association rate of a particular antibody-antigen interaction. Binding affinity is generally measured using a Biacore assay or Octet as is known in the art.

[0075] By “parent polypeptide” or “precursor polypeptide” (including the renumerated anti-Spike antigen binding domains of the invention) as used herein is meant a polypeptide that is subsequently modified to generate a variant. In this case, for example, any one of the starting clones of FIG. 13 can be considered a “parent polypeptide” as is the case of AeroNab6. Parent polypeptide may refer to the polypeptide itself, compositions that comprise the parent polypeptide, or the amino acid sequence that encodes it.

[0076] The polypeptides of the invention have at least about 90%, 91, 92, 92, 94, 95, 96, 97, 98, 99, 99.2. 99.4. 99.6. 99.8 or 100% sequence identity with a sequence set forth herein.

[0077] By “position” as used herein is meant a location in the sequence of a protein. Positions may be numbered sequentially, or according to an established format.

[0078] By “variable heavy domain” or “VH domain” or “VHH domain” herein is meant the region of the antigen binding domain that contains the CDRs. The molecules discussed herein do not contain VL domains. In these embodiments, each VH is composed of three hypervariable regions (“complementary determining regions,” “CDRs”) and four “framework regions”, or “FRs”, arranged from amino-terminus to carboxy-terminus in the following order: FR1-vhhCDR1-FR2-vhhCDR2-FR3-vhhCDR3-FR4. The vhFR regions self-assemble to form the sdABD that are Fv domains. By “single domain Fv”, “sdFv” or “sdABD” herein is meant an antigen binding domain that only has three CDRs, generally based on camelid antibody technology. See: Protein Engineering 9(7):1129-35 (1994); Rev Mol Biotech 74:277-302 (2001); Ann Rev Biochem 82:775-97 (2013). sdABDs are distinguished from single domain antibodies by the lack of the constant domains (in the case of camelid antibodies, the CH2-CH3 domains).

[0079] The hypervariable regions confer antigen binding specificity and generally encompasses amino acid residues from about amino acid residues 24-34 (LCDR1; “L” denotes light chain), 50-56 (LCDR2) and 89-97 (LCDR3) in the light chain variable region and around about 31-35B (HCDR1; “H” denotes heavy chain), 50-65 (HCDR2), and 95-102 (HCDR3) in the heavy chain variable region; Kabat et at, SEQUENCES OF PROTEINS OF IMMUNOLOGICAL INTEREST, 5th Ed. Public Health Service, National Institutes of Health, Bethesda, Md. (1991) and/or those residues forming a hypervariable loop (e.g. residues 26-32 (LCDR1), 50-52 (LCDR2) and 91-96 (LCDR3) in the light chain variable region and 26-32 (HCDR1), 53-55 (HCDR2) and 96-101 (HCDR3) in the heavy chain variable region; Chothia and Lesk (1987) J. Mol. Biol. 196:901-917. Specific CDRs of the invention are described below.

[0080] As described herein the spike antigen is defined by the sequence found in FIG. 17A and/or the following sequence: MFVFLVLLPLVSSQCVNLTTRTQLPPAYTNSFTRGVYYPDKVFRSSVLHSTQDLFLPFFSNVTWFH AIHVSGTNGTKRFDNPVLPFNDGVYFASTEKSNIIRGWIFGTTLDSKTQSLLIVNNATNVVIKVCE FQFCNDPFLGVYYHKNNKSWMESEFRVYSSANNCTFEYVSQPFLMDLEGKQGNFKNLREFVFK NIDGYFKIYSKHTPINLVRDLPQGFSALEPLVDLPIGINITRFQTLLALHRSYLTPGDSSSGWTAGA AAYYVGYLQPRTFLLKYNENGTITDAVDCALDPLSETKCTLKSFTVEKGIYQTSNFRVQPTESIVR FPNITNLCPFGEVFNATRFASVYAWNRKRISNCVADYSVLYNSASFSTFKCYGVSPTKLNDLCFT NVYADSFVIRGDEVRQIAPGQTGKIADYNYKLPDDFTGCVIAWNSNNLDSKVGGNYNYLYRLF RKSNLKPFERDISTEIYQAGSTPCNGVEGFNCYFPLQSYGFQPTNGVGYQPYRVVVLSFELLHAPA TVCGPKKSTNLVKNKCVNFNFNGLTGTGVLTESNKKFLPFQQFGRDIADTTDAVRDPQTLEILDI TPCSFGGVSVITPGTNTSNQVAVLYQDVNCTEVPVAIHADQLTPTWRVYSTGSNVFQTRAGCLI GAEHVNNSYECDIPIGAGICASYQTQTNSPRRARSVASQSIIAYTMSLGAENSVAYSNNSIAIPTN FTISVTTEILPVSMTKTSVDCTMYICGDSTECSNLLLQYGSFCTQLNRALTGIAVEQDKNTQEVFA QVKQIYKTPPIKDFGGFNFSQILPDPSKPSKRSFIEDLLFNKVTLADAGFIKQYGDCLGDIAARDLI CAQKFNGLTVLPPLLTDEMIAQYTSALLAGTITSGWTFGAGAALQIPFAMQMAYRFNGIGVTQN VLYENQKLIANQFNSAIGKIQDSLSSTASALGKLQDVVNQNAQALNTLVKQLSSNFGAISSVLN DILSRLDKVEAEVQIDRLITGRLQSLQTYVTQQLIRAAEIRASANLAATKMSECVLGQSKRVDFCG KGYHLMSFPQSAPHGVVFLHVTYVPAQEKNFTTAPAICHDGKAHFPREGVFVSNGTHWFVTQR NFYEPQIITTDNTFVSGNCDVVIGIVNNTVYDPLQPELDSFKEELDKYFKNHTSPDVDLGDISGIN ASVVNIQKEIDRLNEVAKNLNESLIDLQELGKYEQYIKWPWYIWLGFIAGLIAIVMVTIMLCCMT SCCSCLKGCCSCGSCCKFDEDDSEPVLKGVKLHYT (SEQ ID NO: 300). This sequence is interpreted to include variants arising from mutations in SARS-CoV-2 that might arise from time to time. In various embodiments, the variants differ from the above sequence in the ACE2 binding domain of the spike protein. In some embodiments, the variants differ from the above sequence at a site other than the ACE2 binding domain. In some embodiments, the variants differ from the above sequence in at least the ACE2 binding domain and one other site. In various embodiments, the variant is different than the above sequence by at least 1, 2, 3, 4, 5, 6, 7, 8, 9, 10 or more amino acids.

[0081] As will be appreciated by those in the art, the exact numbering and placement of the CDRs can be different among different numbering systems. However, it should be understood that the disclosure of a variable heavy and/or variable light sequence includes the disclosure of the associated (inherent) CDRs. Accordingly, the disclosure of each variable heavy region is a disclosure of the vhCDRs (e.g. vhCDR1, vhCDR2 and vhCDR3).

[0082] A useful comparison of CDR numbering is as below, see Lafranc et al., Dev. Comp. Immunol. 27(1):55-77 (2003):

TABLE 1

| | Kabat + | | | | | |
|---|---|---|---|---|---|---|
| | Chothia | IMGT | Kabat | AbM | Chothia | Contact |
| vhCDR1 | 26-35 | 27-38 | 31-35 | 26-35 | 26-32 | 30-35 |
| vhCDR2 | 50-65 | 56-65 | 50-65 | 50-58 | 52-56 | 47-58 |
| vhCDR3 | 95-102 | 105-117 | 95-102 | 95-102 | 95-102 | 93-101 |
| vlCDR1 | 24-34 | 27-38 | 24-34 | 24-34 | 24-34 | 30-36 |
| vlCDR2 | 50-56 | 56-65 | 50-56 | 50-56 | 50-56 | 46-55 |
| vlCDR3 | 89-97 | 105-117 | 89-97 | 89-97 | 89-97 | 89-96 |

[0083] Throughout the present specification, the IMGT numbering system is generally used when referring to a residue in the variable domain.

[0084] The present invention provides a large number of different CDR sets which can be assembled into sdABDs. In the context of a single domain ABD (“sdABD”), a CDR set is only three CDRs; these are sometimes referred to in the art as “VHH” domains as well.

[0085] The CDRs contribute to the formation of the antigen-binding, or more specifically, epitope binding sites. “Epitope” refers to a determinant that interacts with a specific antigen binding site in the variable regions known as a paratope. Epitopes are groupings of molecules such as amino acids or sugar side chains and usually have specific structural characteristics, as well as specific charge characteristics. A single antigen may have more than one epitope.

[0086] The epitope may comprise amino acid residues directly involved in the binding (also called immunodominant component of the epitope) and other amino acid residues, which are not directly involved in the binding, such as amino acid residues which are effectively blocked by the specific antigen binding peptide; in other words, the amino acid residue is within the footprint of the specific antigen binding peptide.

[0087] Epitopes may be either conformational or linear. A conformational epitope is produced by spatially juxtaposed amino acids from different segments of the linear polypeptide chain. A linear epitope is one produced by adjacent amino acid residues in a polypeptide chain. Conformational and nonconformational epitopes may be distinguished in that the binding to the former but not the latter is lost in the presence of denaturing solvents.

[0088] An epitope typically includes at least 3, and more usually, at least 5 or 8-10 amino acids in a unique spatial conformation. Antibodies that recognize the same epitope can be verified in a simple immunoassay showing the ability of one antibody to block the binding of another antibody to a target antigen, for example “binning.” As outlined below, the invention not only includes the enumerated antigen binding domains and antibodies herein, but those that compete for binding with the epitopes bound by the enumerated antigen binding domains.

[0089] B. Introduction

[0090] As is known in the art, coronaviruses are enveloped positive-stranded RNA viruses that relies on membrane fusion as an early step for entering host cells. Additionally, the surfaces of many coronaviruses, and SARS-CoV2 in particular, are decorated with a Spike glycoprotein. The Spike protein forms a homotrimeric complex of three identical Spike protein monomers that can be functionally categorized as having two distinct subunits, S1 and S2. The S1 subunit contains the receptor binding domain (RBD) which binds to the ACE2 receptor on human cells, while the S2 subunit is involved in the fusion of the viral and cellular membranes. The RBDs of the trimeric complex can be in two different conformations: an extended, or “up” conformation (sometimes also referred to herein as the “on” conformation), as depicted in FIG. 4, that is accessible for binding to the ACE2 complex, and a “down” or “off” conformation, again depicted in FIG. 4, which represents a receptor-inaccessible state. That is, the Spike protein cannot bind to the ACE2 receptor and infect cells when in the “down” conformation.

[0091] The present invention is directed to antigen binding domains that not only bind to the Spike protein, but bind in such a way as to “lock” the Spike protein in the “off” or “down” position with extremely high affinity. As is shown in FIG. 5, the binding of the MASC proteins of the invention actually bind to two different RBDs (of the three present in the trimer), thus not only keeping the Spike protein “off” but also occupying a part of the ACE2 binding site to further prevent membrane fusion and infection.

[0092] The present invention provides Multivalent Anti-SARS-CoV2 (“MASC”) fusion proteins to antigen binding domains (ABDs) that bind in a multivalent way to the trimeric Spike protein of the SARS-CoV2 virus with very high affinity. The antigen binding domains are based on single domain antibodies (sdAbs) that contain a single variable heavy domain (frequently referred to in the field as “VHH” domains) instead of the typical variable heavy and variable light domains of traditional antibodies. The single domain antigen binding domains (sdABDs) confer a number of advantages in their use to bind to viral proteins, as they are significantly smaller than traditional ABDs, have generally high thermal stability, and increased solubility, as further discussed below.

[0093] Additionally, as has been shown for other sdABDs, the sdABDs of the present invention can be assembled into multimeric structures such as dimers and trimers, similar to other “Nanobodies™”; see generally U.S. Pat. No. 9,834,595. Thus, the present invention provides multivalent anti-SARS-CoV2 (“MASC”) fusion proteins that contain sdABDs linked together through domain linkers as is more fully described below that bind the Spike protein and prevent viral entry into human cells via the ACE2 receptor, as is further discussed below.

[0094] In these multivalent embodiments, the fusion proteins of the invention have a several different components, generally referred to herein as domains, which are linked together in a variety of ways depending on the format. Some of the domains are binding domains, that each bind to the target Spike protein, and some are domain linkers. Thus, as generally pictured in FIG. 6, the present invention provides for MASC proteins that comprise a single sdABD that binds the RBD, as well as MASC fusion proteins that contain two sdABDs linked using a domain linker (sdABD-domain linker-sdABD) and MASC fusion proteins that contain three sdABDs linked with domain linkers (sdABD-domain linker-sdABD-domain linker-sdABD). As discussed below, these domain linkers can be the same or different.

[0095] Another distinct advantage of the MASC fusion proteins of the invention is that due to their significant thermal and structure stability, the MASC fusion proteins can be lyophilized and/or aerosolized while retaining binding and neutralization functions. The possibility of administering these MASC fusion proteins directly to the pulmonary system is particularly useful in the case of the SARS-CoV2 virus, as it is known to act specifically in the lungs.

[0096] Accordingly, the present invention provides MASC proteins and MASC fusion proteins as is further described herein.

[0097] C. Multivalent Anti-SARS-CoV2 (“MASC”) Proteins

[0098] Accordingly, the present invention provides MASC proteins that can take several different formats. As discussed herein, the MASC proteins can be a single sdABD as outlined herein, sometimes referred to herein as “monomeric MASC proteins”. MASC proteins can also be linked together to form dimers and trimers as discussed herein. In these embodiments, the dimers and trimers are referred to generally as “MASC fusion proteins”, and there are domain linkers between the monomers.

[0099] As will be appreciated by those in the art and more fully described below, in addition to multimers of a single sdABD, multimers can also be made using sdABDs with different binding affinities or properties. That is, a dimeric MASC fusion protein can be “homodimeric”, with the sdABDs having the identical CDRs and/or sequence, or “heterodimeric”, where one sdABD has one set of CDRs and the other has a different set of CDRs. Similarly, trimeric MASC fusion proteins can be homotrimers, or they can be heterotrimers, either utilizing two different sdABDs with different CDRs (two of one and one of the other in the trimer), or heterotrimers with three different CDR sets.

[0100] Additionally, as more fully discussed below, the MASC fusion proteins can also include an additional domain that serves to extend the half-life of the MASC protein in plasma. Thus, for example, monomeric, dimeric or trimeric MASC proteins can be fused to a half-life extension domain.

[0101] As discussed herein, 21 different clones were originally made, representing a wide variety of antigen binding domains as depicted in FIG. 13. All of these clones bound the spike trimer.

[0102] Furthermore, as discussed herein, any of the parental MASC proteins shown in FIG. 13 can undergo affinity maturation. An exemplary example is the affinity maturation of AeroNab6, discussed herein. An affinity maturation campaign resulted in a number of changes in the vhhCDRs, all of which can be combined.

[0103] Similarly, as will be appreciated by those in the art, the parental MASC proteins of FIG. 13, or affinity matured MASC proteins can also be humanized. Humanization techniques are well known in the art.

[0104] As further discussed below, AeroNab6 MASC makes extensive contacts within the ACE2 binding region of the SC2 spike RBD, including residues 446, 447, 449, 453, 455, 456, 483-486, 489-490, 493-496, 498, 501, and 505). The CDR3 of AeroNab6 MASC contacts a neighboring RBD on the SC2 spike at a three dimensional epitope defined by residues 342, 343, 367, 371-375, 404, 436-441. This additional contact enables AeroNab6 MASC to locking the neighboring RBD in the “off” position, while simultaneously disrupting ACE2 binding at an adjacent RBD.

[0105] Additionally, it is known in the art that there can be immunogenicity in humans originating from the C-terminal sequences of certain ABDs. Accordingly, in general, when the C-terminus of the constructs terminates in an sdABD such as depicted here, a histidine tag (either His6 or His10) can be used. These in some cases can be used as purification tags as well, but these sequences can also be used to reduce immunogenicity in humans, as is shown by Holland et al., DOI 10.1007/s10875-013-9915-0 and WO2013/024059.

[0106] 1. Monomeric Constructs

[0107] In some embodiments, the MASC protein is a single sdABD, as generally depicted in FIG. 6, and thus is a composition comprising a sdABD comprising, from N- to C-terminal, FR1-vhCDR1-FR2-vhCDR2-FR3-vhCDR3-FR, wherein the vhhCDR1, vhhCDR2 and vhhCDR3 domains are selected from the sets depicted in FIG. 13, FIG. 15, FIG. 18 and FIG. 25.

[0108] In some monomeric embodiments, the said vhCDR1 has a sequence GI(I/Y/W/F/V/L)FGRNA, said vhCDR2 has a sequence TRR(G/H/Y/G/Q)SITY and said vhCDR3 has a sequence AADPA(S/V/L/I/T)PA(P/F/W/Y/L/V)GDY as discussed above. Additionally, in this embodiment, the framework regions can have SEQ ID NO:1 (FR1), SEQ ID NO:2 (FR2), SEQ ID NO:3 (FR3) and SEQ ID NO:4 (FR4).

[0109] In some embodiments, the sdABD has a set of a three CDRs where vhCDR1 has SEQ ID NO:5, vhCDR2 has SEQ ID NO:6, and vhCDR3 has SEQ ID NO:7. In this embodiment, the framework regions can have SEQ ID NO:1 (FR1), SEQ ID NO:2 (FR2), SEQ ID NO:3 (FR3) and SEQ ID NO:4 (FR4), or can be different.

[0110] In some embodiments, the sdABD has a set of a three CDRs where vhCDR1 has SEQ ID NO:8, vhCDR2 has SEQ ID NO:9, and vhCDR3 has SEQ ID NO:10. In this embodiment, the framework regions can have SEQ ID NO:1 (FR1), SEQ ID NO:2 (FR2), SEQ ID NO:3 (FR3) and SEQ ID NO:4 (FR4), or can be different.

[0111] In some embodiments, the sdABD has a set of a three CDRs where vhCDR1 has SEQ ID NO:11, vhCDR2 has SEQ ID NO:12, and vhCDR3 has SEQ ID NO:13. In this embodiment, the framework regions can have SEQ ID NO:1 (FR1), SEQ ID NO:2 (FR2), SEQ ID NO:3 (FR3) and SEQ ID NO:4 (FR4), or can be different.

[0112] In some embodiments, the sdABD has a set of a three CDRs where vhCDR1 has SEQ ID NO:14, vhCDR2 has SEQ ID NO:15, and vhCDR3 has SEQ ID NO:16. In this embodiment, the framework regions can have SEQ ID NO:1 (FR1), SEQ ID NO:2 (FR2), SEQ ID NO:3 (FR3) and SEQ ID NO:4 (FR4), or can be different.

[0113] In some embodiments, the sdABD has a set of a three CDRs where vhCDR1 has SEQ ID NO:17, vhCDR2 has SEQ ID NO:18, and vhCDR3 has SEQ ID NO:19. In this embodiment, the framework regions can have SEQ ID NO:1 (FR1), SEQ ID NO:2 (FR2), SEQ ID NO:3 (FR3) and SEQ ID NO:4 (FR4), or can be different.

[0114] In some embodiments, the sdABD has a set of a three CDRs where vhCDR1 has SEQ ID NO:20, vhCDR2 has SEQ ID NO:21, and vhCDR3 has SEQ ID NO:22. In this embodiment, the framework regions can have SEQ ID NO:1 (FR1), SEQ ID NO:2 (FR2), SEQ ID NO:3 (FR3) and SEQ ID NO:4 (FR4), or can be different.

[0115] In some embodiments, the sdABD has a set of a three CDRs where vhCDR1 has SEQ ID NO:23, vhCDR2 has SEQ ID NO:24, and vhCDR3 has SEQ ID NO:25. In this embodiment, the framework regions can have SEQ ID NO:1 (FR1), SEQ ID NO:2 (FR2), SEQ ID NO:3 (FR3) and SEQ ID NO:4 (FR4), or can be different.

[0116] In some embodiments, the sdABD has a set of a three CDRs where vhCDR1 has SEQ ID NO:26, vhCDR2 has SEQ ID NO:27, and vhCDR3 has SEQ ID NO:28. In this embodiment, the framework regions can have SEQ ID NO:1 (FR1), SEQ ID NO:2 (FR2), SEQ ID NO:3 (FR3) and SEQ ID NO:4 (FR4), or can be different.

[0117] In some embodiments, the sdABD has a set of a three CDRs where vhCDR1 has SEQ ID NO:29, vhCDR2 has SEQ ID NO:30, and vhCDR3 has SEQ ID NO:31. In this embodiment, the framework regions can have SEQ ID NO:1 (FR1), SEQ ID NO:2 (FR2), SEQ ID NO:3 (FR3) and SEQ ID NO:4 (FR4), or can be different.

[0118] In some embodiments, the sdABD has a set of a three CDRs where vhCDR1 has SEQ ID NO:32, vhCDR2 has SEQ ID NO:33, and vhCDR3 has SEQ ID NO:34. In this embodiment, the framework regions can have SEQ ID NO:1 (FR1), SEQ ID NO:2 (FR2), SEQ ID NO:3 (FR3) and SEQ ID NO:4 (FR4), or can be different.

[0119] In some embodiments, the sdABD has a set of a three CDRs where vhCDR1 has SEQ ID NO:35, vhCDR2 has SEQ ID NO:36, and vhCDR3 has SEQ ID NO:37. In this embodiment, the framework regions can have SEQ ID NO:1 (FR1), SEQ ID NO:2 (FR2), SEQ ID NO:3 (FR3) and SEQ ID NO:4 (FR4), or can be different.

[0120] In some embodiments, the sdABD has a set of a three CDRs where vhCDR1 has SEQ ID NO:38, vhCDR2 has SEQ ID NO:39, and vhCDR3 has SEQ ID NO:40. In this embodiment, the framework regions can have SEQ ID NO:1 (FR1), SEQ ID NO:2 (FR2), SEQ ID NO:3 (FR3) and SEQ ID NO:4 (FR4), or can be different.

[0121] In some embodiments, the sdABD has a set of a three CDRs where vhCDR1 has SEQ ID NO:41, vhCDR2 has SEQ ID NO:42, and vhCDR3 has SEQ ID NO:43. In this embodiment, the framework regions can have SEQ ID NO:1 (FR1), SEQ ID NO:2 (FR2), SEQ ID NO:3 (FR3) and SEQ ID NO:4 (FR4), or can be different.

[0122] In some embodiments, the sdABD has a set of a three CDRs where vhCDR1 has SEQ ID NO44:, vhCDR2 has SEQ ID NO45:, and vhCDR3 has SEQ ID NO:46. In this embodiment, the framework regions can have SEQ ID NO:1 (FR1), SEQ ID NO:2 (FR2), SEQ ID NO:3 (FR3) and SEQ ID NO:4 (FR4), or can be different.

[0123] In some embodiments, the sdABD has a set of a three CDRs where vhCDR1 has SEQ ID NO:47, vhCDR2 has SEQ ID NO:48, and vhCDR3 has SEQ ID NO:49. In this embodiment, the framework regions can have SEQ ID NO:1 (FR1), SEQ ID NO:2 (FR2), SEQ ID NO:3 (FR3) and SEQ ID NO:4 (FR4), or can be different.

[0124] In some embodiments, the sdABD has a set of a three CDRs where vhCDR1 has SEQ ID NO:50, vhCDR2 has SEQ ID NO:51, and vhCDR3 has SEQ ID NO:52. In this embodiment, the framework regions can have SEQ ID NO:1 (FR1), SEQ ID NO:2 (FR2), SEQ ID NO:3 (FR3) and SEQ ID NO:4 (FR4), or can be different.

[0125] In some embodiments, the sdABD has a set of a three CDRs where vhCDR1 has SEQ ID NO:53, vhCDR2 has SEQ ID NO:54, and vhCDR3 has SEQ ID NO:55. In this embodiment, the framework regions can have SEQ ID NO:1 (FR1), SEQ ID NO:2 (FR2), SEQ ID NO:3 (FR3) and SEQ ID NO:4 (FR4), or can be different.

[0126] In some embodiments, the sdABD has a set of a three CDRs where vhCDR1 has SEQ ID NO:56, vhCDR2 has SEQ ID NO:57, and vhCDR3 has SEQ ID NO:58. In this embodiment, the framework regions can have SEQ ID NO:1 (FR1), SEQ ID NO:2 (FR2), SEQ ID NO:3 (FR3) and SEQ ID NO:4 (FR4), or can be different.

[0127] In some embodiments, the sdABD has a set of a three CDRs where vhCDR1 has SEQ ID NO:59, vhCDR2 has SEQ ID NO:60, and vhCDR3 has SEQ ID NO:61. In this embodiment, the framework regions can have SEQ ID NO:1 (FR1), SEQ ID NO:2 (FR2), SEQ ID NO:3 (FR3) and SEQ ID NO:4 (FR4), or can be different.

[0128] In some embodiments, the sdABD has a set of a three CDRs where vhCDR1 has SEQ ID N062 vhCDR2 has SEQ ID NO:63, and vhCDR3 has SEQ ID NO:64. In this embodiment, the framework regions can have SEQ ID NO:1 (FR1), SEQ ID NO:2 (FR2), SEQ ID NO:3 (FR3) and SEQ ID NO:4 (FR4), or can be different.

[0129] In some embodiments, the sdABD has a set of a three CDRs where vhCDR1 has SEQ ID NO:65, vhCDR2 has SEQ ID NO:66, and vhCDR3 has SEQ ID NO:67. In this embodiment, the framework regions can have SEQ ID NO:1 (FR1), SEQ ID NO:2 (FR2), SEQ ID NO:3 (FR3) and SEQ ID NO:4 (FR4), or can be different.

[0130] In some embodiments, the sdABD has a set of a three CDRs where vhCDR1 has SEQ ID NO:68, vhCDR2 has SEQ ID NO:69, and vhCDR3 has SEQ ID NO:70. In this embodiment, the framework regions can have SEQ ID NO:1 (FR1), SEQ ID NO:2 (FR2), SEQ ID NO:3 (FR3) and SEQ ID NO:4 (FR4), or can be different.

[0131] In some embodiments, the sdABD has a set of a three CDRs where vhCDR1 has SEQ ID NO:71, vhCDR2 has SEQ ID NO:72, and vhCDR3 has SEQ ID NO:73. In this embodiment, the framework regions can have SEQ ID NO:1 (FR1), SEQ ID NO:2 (FR2), SEQ ID NO:3 (FR3) and SEQ ID NO:4 (FR4), or can be different.

[0132] In some embodiments, the sdABD has a set of a three CDRs where vhCDR1 has SEQ ID NO:74, vhCDR2 has SEQ ID NO:75, and vhCDR3 has SEQ ID NO:76. In this embodiment, the framework regions can have SEQ ID NO:1 (FR1), SEQ ID NO:2 (FR2), SEQ ID NO:3 (FR3) and SEQ ID NO:4 (FR4), or can be different.

[0133] In a particularly useful embodiment, the MASC protein is “AeroNab6mh” and has the sequence

EVQLVESGGGLVQPGGSLRLSCAASGYIFGRNAMGWYRQAPGKGLELVA
GITRRGSITYYADSVKGRFTISRDNSKNTLYLQMNSLRAEDTAVYYCAA
DPASPAYGDYWGQGTQVTVSS.

[0134] 2. Dimeric Constructs

[0135] In some embodiments, the MASC protein is a MASC fusion protein and contains two sdABDs, as generally depicted in FIG. 6, and thus is a composition comprising a sdABD comprising, from N- to C-terminal, FR1-vhhCDR1-FR2-vhhCDR2-FR3-vhhCDR3-FR4-domain linker-FR1-vhhCDR1-FR2-vhhCDR2-FR3-vhhCDR3-FR4, wherein the vhhCDR1, vhhCDR2 and vhhCDR3 domains are selected from the sets depicted in FIG. 13, FIG. 15, FIG. 18 and FIG. 25.

[0136] In many embodiments, the two sdABDs that make up the dimer are the same, and the domain linker is selected from (GGGGS)₃ and (GGGGS)₄.

[0137] Accordingly, in some dimeric embodiments, the said vhCDR1 has a sequence GI(I/Y/W/F/V/L)FGRNA, said vhCDR2 has a sequence TRR(G/H/Y/G/Q)SITY and said vhCDR3 has a sequence AADPA(S/V/L/I/T)PA(P/F/W/Y/L/V)GDY as discussed above. Additionally, in this embodiment, the framework regions can have SEQ ID NO:1 (FR1), SEQ ID NO:2 (FR2), SEQ ID NO:3 (FR3) and SEQ ID NO:4 (FR4) and the domain linker is (GGGGS)₃.

[0138] Accordingly, in some dimeric embodiments, the said vhCDR1 has a sequence GI(I/Y/W/F/V/L)FGRNA, said vhCDR2 has a sequence TRR(G/H/Y/G/Q)SITY and said vhCDR3 has a sequence AADPA(S/V/L/I/T)PA(P/F/W/Y/L/V)GDY as discussed above. Additionally, in this embodiment, the framework regions can have SEQ ID NO:1 (FR1), SEQ ID NO:2 (FR2), SEQ ID NO:3 (FR3) and SEQ ID NO:4 (FR4) and the domain linker is (GGGGS)_{4.}

[0139] In some dimeric embodiments, the two sdABDs each have a set of three CDRs where vhCDR1 has SEQ ID NO:5, vhCDR2 has SEQ ID NO:6, and vhCDR3 has SEQ ID NO:7. In this embodiment, the framework regions can have SEQ ID NO:1 (FR1), SEQ ID NO:2 (FR2), SEQ ID NO:3 (FR3) and SEQ ID NO:4 (FR4), and the domain linker is selected from (GGGGS)₃ and (GGGGS)₄.

[0140] In some dimeric embodiments, the two sdABDs each have a set of three CDRs where vhCDR1 has SEQ ID NO:8, vhCDR2 has SEQ ID NO:9, and vhCDR3 has SEQ ID NO:10. In this embodiment, the framework regions can have SEQ ID NO:1 (FR1), SEQ ID NO:2 (FR2), SEQ ID NO:3 (FR3) and SEQ ID NO:4 (FR4), and the domain linker is selected from (GGGGS)₃ and (GGGGS)₄.

[0141] In some dimeric embodiments, the two sdABDs each have a set of three CDRs where vhCDR1 has SEQ ID NO:11, vhCDR2 has SEQ ID NO:12, and vhCDR3 has SEQ ID NO:13. In this embodiment, the framework regions can have SEQ ID NO:1 (FR1), SEQ ID NO:2 (FR2), SEQ ID NO:3 (FR3) and SEQ ID NO:4 (FR4), and the domain linker is selected from (GGGGS)₃ and (GGGGS)₄.

[0142] In some dimeric embodiments, the two sdABDs each have a set of three CDRs where vhCDR1 has SEQ ID NO:14, vhCDR2 has SEQ ID NO:15, and vhCDR3 has SEQ ID NO:16. In this embodiment, the framework regions can have SEQ ID NO:1 (FR1), SEQ ID NO:2 (FR2), SEQ ID NO:3 (FR3) and SEQ ID NO:4 (FR4), and the domain linker is selected from (GGGGS)₃ and (GGGGS)₄. In some dimeric embodiments, the two sdABDs each have a set of three CDRs where vhCDR1 has SEQ ID NO:17, vhCDR2 has SEQ ID NO:18, and vhCDR3 has SEQ ID NO:19. In this embodiment, the framework regions can have SEQ ID NO:1 (FR1), SEQ ID NO:2 (FR2), SEQ ID NO:3 (FR3) and SEQ ID NO:4 (FR4), and the domain linker is selected from (GGGGS)₃ and (GGGGS)₄.

[0143] In some dimeric embodiments, the two sdABDs each have a set of three CDRs where vhCDR1 has SEQ ID NO:20, vhCDR2 has SEQ ID NO:21, and vhCDR3 has SEQ ID NO:22. In this embodiment, the framework regions can have SEQ ID NO:1 (FR1), SEQ ID NO:2 (FR2), SEQ ID NO:3 (FR3) and SEQ ID NO:4 (FR4), and the domain linker is selected from (GGGGS)₃ and (GGGGS)₄.

[0144] In some dimeric embodiments, the two sdABDs each have a set of three CDRs where vhCDR1 has SEQ ID NO:23, vhCDR2 has SEQ ID NO:24, and vhCDR3 has SEQ ID NO:25. In this embodiment, the framework regions can have SEQ ID NO:1 (FR1), SEQ ID NO:2 (FR2), SEQ ID NO:3 (FR3) and SEQ ID NO:4 (FR4), and the domain linker is selected from (GGGGS)₃ and (GGGGS)₄.

[0145] In some dimeric embodiments, the two sdABDs each have a set of three CDRs where vhCDR1 has SEQ ID NO:26, vhCDR2 has SEQ ID NO:27, and vhCDR3 has SEQ ID NO:28. In this embodiment, the framework regions can have SEQ ID NO:1 (FR1), SEQ ID NO:2 (FR2), SEQ ID NO:3 (FR3) and SEQ ID NO:4 (FR4), and the domain linker is selected from (GGGGS)₃ and (GGGGS)₄.

[0146] In some dimeric embodiments, the two sdABDs each have a set of three CDRs where vhCDR1 has SEQ ID NO:29, vhCDR2 has SEQ ID NO:30, and vhCDR3 has SEQ ID NO:31. In this embodiment, the framework regions can have SEQ ID NO:1 (FR1), SEQ ID NO:2 (FR2), SEQ ID NO:3 (FR3) and SEQ ID NO:4 (FR4), and the domain linker is selected from (GGGGS)₃ and (GGGGS)₄.

[0147] In some dimeric embodiments, the two sdABDs each have a set of three CDRs where vhCDR1 has SEQ ID NO:32, vhCDR2 has SEQ ID NO:33, and vhCDR3 has SEQ ID NO:34. In this embodiment, the framework regions can have SEQ ID NO:1 (FR1), SEQ ID NO:2 (FR2), SEQ ID NO:3 (FR3) and SEQ ID NO:4 (FR4), and the domain linker is selected from (GGGGS)₃ and (GGGGS)₄.

[0148] In some dimeric embodiments, the two sdABDs each have a set of three CDRs where vhCDR1 has SEQ ID NO:35, vhCDR2 has SEQ ID NO:36, and vhCDR3 has SEQ ID NO:37. In this embodiment, the framework regions can have SEQ ID NO:1 (FR1), SEQ ID NO:2 (FR2), SEQ ID NO:3 (FR3) and SEQ ID NO:4 (FR4), and the domain linker is selected from (GGGGS)₃ and (GGGGS)₄.

[0149] In some dimeric embodiments, the two sdABDs each have a set of three CDRs where vhCDR1 has SEQ ID NO:38, vhCDR2 has SEQ ID NO:39, and vhCDR3 has SEQ ID NO:40. In this embodiment, the framework regions can have SEQ ID NO:1 (FR1), SEQ ID NO:2 (FR2), SEQ ID NO:3 (FR3) and SEQ ID NO:4 (FR4), and the domain linker is selected from (GGGGS)₃ and (GGGGS)₄.

[0150] In some dimeric embodiments, the two sdABDs each have a set of three CDRs where vhCDR1 has SEQ ID NO:41, vhCDR2 has SEQ ID NO:42, and vhCDR3 has SEQ ID NO:43. In this embodiment, the framework regions can have SEQ ID NO:1 (FR1), SEQ ID NO:2 (FR2), SEQ ID NO:3 (FR3) and SEQ ID NO:4 (FR4), and the domain linker is selected from (GGGGS)₃ and (GGGGS)₄.

[0151] In some dimeric embodiments, the two sdABDs each have a set of three CDRs where vhCDR1 has SEQ ID NO44:, vhCDR2 has SEQ ID NO45:, and vhCDR3 has SEQ ID NO:46. In this embodiment, the framework regions can have SEQ ID NO:1 (FR1), SEQ ID NO:2 (FR2), SEQ ID NO:3 (FR3) and SEQ ID NO:4 (FR4), and the domain linker is selected from (GGGGS)₃ and (GGGGS)₄.

[0152] In some dimeric embodiments, the two sdABDs each have a set of three CDRs where vhCDR1 has SEQ ID NO:47, vhCDR2 has SEQ ID NO:48, and vhCDR3 has SEQ ID NO:49. In this embodiment, the framework regions can have SEQ ID NO:1 (FR1), SEQ ID NO:2 (FR2), SEQ ID NO:3 (FR3) and SEQ ID NO:4 (FR4), and the domain linker is selected from (GGGGS)₃ and (GGGGS)₄.

[0153] In some dimeric embodiments, the two sdABDs each have a set of three CDRs where vhCDR1 has SEQ ID NO:50, vhCDR2 has SEQ ID NO:51, and vhCDR3 has SEQ ID NO:52. In this embodiment, the framework regions can have SEQ ID NO:1 (FR1), SEQ ID NO:2 (FR2), SEQ ID NO:3 (FR3) and SEQ ID NO:4 (FR4), and the domain linker is selected from (GGGGS)₃ and (GGGGS)₄.

[0154] In some dimeric embodiments, the two sdABDs each have a set of three CDRs where vhCDR1 has SEQ ID NO:53, vhCDR2 has SEQ ID NO:54, and vhCDR3 has SEQ ID NO:55. In this embodiment, the framework regions can have SEQ ID NO:1 (FR1), SEQ ID NO:2 (FR2), SEQ ID NO:3 (FR3) and SEQ ID NO:4 (FR4), and the domain linker is selected from (GGGGS)₃ and (GGGGS)₄.

[0155] In some dimeric embodiments, the two sdABDs each have a set of three CDRs where vhCDR1 has SEQ ID NO:56, vhCDR2 has SEQ ID NO:57, and vhCDR3 has SEQ ID NO:58. In this embodiment, the framework regions can have SEQ ID NO:1 (FR1), SEQ ID NO:2 (FR2), SEQ ID NO:3 (FR3) and SEQ ID NO:4 (FR4), and the domain linker is selected from (GGGGS)₃ and (GGGGS)₄.

[0156] In some dimeric embodiments, the two sdABDs each have a set of three CDRs where vhCDR1 has SEQ ID NO:59, vhCDR2 has SEQ ID NO:60, and vhCDR3 has SEQ ID NO:61. In this embodiment, the framework regions can have SEQ ID NO:1 (FR1), SEQ ID NO:2 (FR2), SEQ ID NO:3 (FR3) and SEQ ID NO:4 (FR4), and the domain linker is selected from (GGGGS)₃ and (GGGGS)₄.

[0157] In some dimeric embodiments, the two sdABDs each have a set of three CDRs where vhCDR1 has SEQ ID N062 vhCDR2 has SEQ ID NO:63, and vhCDR3 has SEQ ID NO:64. In this embodiment, the framework regions can have SEQ ID NO:1 (FR1), SEQ ID NO:2 (FR2), SEQ ID NO:3 (FR3) and SEQ ID NO:4 (FR4), and the domain linker is selected from (GGGGS)₃ and (GGGGS)₄.

[0158] In some dimeric embodiments, the two sdABDs each have a set of three CDRs where vhCDR1 has SEQ ID NO:65, vhCDR2 has SEQ ID NO:66, and vhCDR3 has SEQ ID NO:67. In this embodiment, the framework regions can have SEQ ID NO:1 (FR1), SEQ ID NO:2 (FR2), SEQ ID NO:3 (FR3) and SEQ ID NO:4 (FR4), and the domain linker is selected from (GGGGS)₃ and (GGGGS)₄.

[0159] In some dimeric embodiments, the two sdABDs each have a set of three CDRs where vhCDR1 has SEQ ID NO:68, vhCDR2 has SEQ ID NO:69, and vhCDR3 has SEQ ID NO:70. In this embodiment, the framework regions can have SEQ ID NO:1 (FR1), SEQ ID NO:2 (FR2), SEQ ID NO:3 (FR3) and SEQ ID NO:4 (FR4), and the domain linker is selected from (GGGGS)₃ and (GGGGS)₄.

[0160] In some dimeric embodiments, the two sdABDs each have a set of three CDRs where vhCDR1 has SEQ ID NO:71, vhCDR2 has SEQ ID NO:72, and vhCDR3 has SEQ ID NO:73. In this embodiment, the framework regions can have SEQ ID NO:1 (FR1), SEQ ID NO:2 (FR2), SEQ ID NO:3 (FR3) and SEQ ID NO:4 (FR4), and the domain linker is selected from (GGGGS)₃ and (GGGGS)₄.

[0161] In some dimeric embodiments, the two sdABDs each have a set of three CDRs where vhCDR1 has SEQ ID NO:74, vhCDR2 has SEQ ID NO:75, and vhCDR3 has SEQ ID NO:76. In this embodiment, the framework regions can have SEQ ID NO:1 (FR1), SEQ ID NO:2 (FR2), SEQ ID NO:3 (FR3) and SEQ ID NO:4 (FR4), and the domain linker is selected from (GGGGS)₃ and (GGGGS)₄.

[0162] In a particularly useful embodiment, the MASC protein is “AeroNab6mhX2” and has the sequence:

EVQLVESGGGLVQPGGSLRLSCAASGYIFGRNAMGWYRQAPGKGLELVA
GITRRGSITYYADSVKGRFTISRDNSKNTLYLQMNSLRAEDTAVYYCAA
DPASPAYGDYWGQGTQVTVSS/GGGGSGGGGSGGGGS/EVQLVESGGGL
VQPGGSLRLSCAASGYIFGRNAMGWYRQAPGKGLELVAGITRRGSITYY
ADSVKGRFTISRDNSKNTLYLQMNSLRAEDTAVYYCAADPASPAYGDYW
GQGTQVTVSS

[0163] In a particularly useful embodiment, the MASC protein is “AeroNab6mhX2” and has the sequence:

EVQLVESGGGLVQPGGSLRLSCAASGYIFGRNAMGWYRQAPGKGLELVA
GITRRGSITYYADSVKGRFTISRDNSKNTLYLQMNSLRAEDTAVYYCAA
DPASPAYGDYWGQGTQVTVSS/GGGGSGGGGSGGGGSGGGGS/EVQLVE
SGGGLVQPGGSLRLSCAASGYIFGRNAMGWYRQAPGKGLELVAGITRRG
SITYYADSVKGRFTISRDNSKNTLYLQMNSLRAEDTAVYYCAADPASPA
YGDYWGQGTQVTVSS

[0164] In some embodiments, the two sdABDs that make up the dimer are different. For example, in one embodiment, one of the sdABDs is “AeroNab6mh” and the other has the CDRs of NbCoV003, SEQ ID NO:21, SEQ ID NO:22 and SEQ ID NO:23; see FIG. 26.

[0165] 3. Trimeric Constructs

[0166] In some embodiments, the MASC protein is a MASC fusion protein and contains three sdABDs, as generally depicted in FIG. 6, and thus is a composition comprising a sdABD comprising, from N- to C-terminal, FR1-vhhCDR1-FR2-vhhCDR2-FR3-vhhCDR3-FR4-domain linker-FR1-vhhCDR1-FR2-vhhCDR2-FR3-vhhCDR3-FR4, wherein the vhhCDR1, vhhCDR2 and vhhCDR3 domains are selected from the sets depicted in FIG. 13, FIG. 15, FIG. 18 and FIG. 25.

[0167] In many embodiments, the three sdABDs that make up the trimer are the same, and the domain linker is selected from (GGGGS)₃ and (GGGGS)₄.

[0168] Accordingly, in some trimeric embodiments, the said vhCDR1 has a sequence GI(I/Y/W/F/V/L)FGRNA, said vhCDR2 has a sequence TRR(G/H/Y/G/Q)SITY and said vhCDR3 has a sequence AADPA(S/V/L/I/T)PA(P/F/W/Y/L/V)GDY as discussed above. Additionally, in this embodiment, the framework regions can have SEQ ID NO:1 (FR1), SEQ ID NO:2 (FR2), SEQ ID NO:3 (FR3) and SEQ ID NO:4 (FR4) and the domain linker is (GGGGS)₃.

[0169] Accordingly, in some trimeric embodiments, the said vhCDR1 has a sequence GI(I/Y/W/F/V/L)FGRNA, said vhCDR2 has a sequence TRR(G/H/Y/G/Q)SITY and said vhCDR3 has a sequence AADPA(S/V/L/I/T)PA(P/F/W/Y/L/V)GDY as discussed above. Additionally, in this embodiment, the framework regions can have SEQ ID NO:1 (FR1), SEQ ID NO:2 (FR2), SEQ ID NO:3 (FR3) and SEQ ID NO:4 (FR4) and the domain linker is (GGGGS)₄.

[0170] In some trimeric embodiments, the two sdABDs each have a set of three CDRs where vhCDR1 has SEQ ID NO:5, vhCDR2 has SEQ ID NO:6, and vhCDR3 has SEQ ID NO:7. In this embodiment, the framework regions can have SEQ ID NO:1 (FR1), SEQ ID NO:2 (FR2), SEQ ID NO:3 (FR3) and SEQ ID NO:4 (FR4), and the domain linker is selected from (GGGGS)₃ and (GGGGS)₄.

[0171] In some trimeric embodiments, the two sdABDs each have a set of three CDRs where vhCDR1 has SEQ ID NO:8, vhCDR2 has SEQ ID NO:9, and vhCDR3 has SEQ ID NO:10. In this embodiment, the framework regions can have SEQ ID NO:1 (FR1), SEQ ID NO:2 (FR2), SEQ ID NO:3 (FR3) and SEQ ID NO:4 (FR4), and the domain linker is selected from (GGGGS)₃ and (GGGGS)₄.

[0172] In some trimeric embodiments, the two sdABDs each have a set of three CDRs where vhCDR1 has SEQ ID NO:11, vhCDR2 has SEQ ID NO:12, and vhCDR3 has SEQ ID NO:13. In this embodiment, the framework regions can have SEQ ID NO:1 (FR1), SEQ ID NO:2 (FR2), SEQ ID NO:3 (FR3) and SEQ ID NO:4 (FR4), and the domain linker is selected from (GGGGS)₃ and (GGGGS)₄.

[0173] In some trimeric embodiments, the two sdABDs each have a set of three CDRs where vhCDR1 has SEQ ID NO:14, vhCDR2 has SEQ ID NO:15, and vhCDR3 has SEQ ID NO:16. In this embodiment, the framework regions can have SEQ ID NO:1 (FR1), SEQ ID NO:2 (FR2), SEQ ID NO:3 (FR3) and SEQ ID NO:4 (FR4), and the domain linker is selected from (GGGGS)₃ and (GGGGS)₄.

[0174] In some trimeric dimeric embodiments, the two sdABDs each have a set of three CDRs where vhCDR1 has SEQ ID NO:17, vhCDR2 has SEQ ID NO:18, and vhCDR3 has SEQ ID NO:19. In this embodiment, the framework regions can have SEQ ID NO:1 (FR1), SEQ ID NO:2 (FR2), SEQ ID NO:3 (FR3) and SEQ ID NO:4 (FR4), and the domain linker is selected from (GGGGS)₃ and (GGGGS)₄.

[0175] In some trimeric embodiments, the two sdABDs each have a set of three CDRs where vhCDR1 has SEQ ID NO:20, vhCDR2 has SEQ ID NO:21, and vhCDR3 has SEQ ID NO:22. In this embodiment, the framework regions can have SEQ ID NO:1 (FR1), SEQ ID NO:2 (FR2), SEQ ID NO:3 (FR3) and SEQ ID NO:4 (FR4), and the domain linker is selected from (GGGGS)₃ and (GGGGS)₄.

[0176] In some trimeric embodiments, the two sdABDs each have a set of three CDRs where vhCDR1 has SEQ ID NO:23, vhCDR2 has SEQ ID NO:24, and vhCDR3 has SEQ ID NO:25. In this embodiment, the framework regions can have SEQ ID NO:1 (FR1), SEQ ID NO:2 (FR2), SEQ ID NO:3 (FR3) and SEQ ID NO:4 (FR4), and the domain linker is selected from (GGGGS)₃ and (GGGGS)₄.

[0177] In some trimeric embodiments, the two sdABDs each have a set of three CDRs where vhCDR1 has SEQ ID NO:26, vhCDR2 has SEQ ID NO:27, and vhCDR3 has SEQ ID NO:28. In this embodiment, the framework regions can have SEQ ID NO:1 (FR1), SEQ ID NO:2 (FR2), SEQ ID NO:3 (FR3) and SEQ ID NO:4 (FR4), and the domain linker is selected from (GGGGS)₃ and (GGGGS)₄.

[0178] In some trimeric embodiments, the two sdABDs each have a set of three CDRs where vhCDR1 has SEQ ID NO:29, vhCDR2 has SEQ ID NO:30, and vhCDR3 has SEQ ID NO:31. In this embodiment, the framework regions can have SEQ ID NO:1 (FR1), SEQ ID NO:2 (FR2), SEQ ID NO:3 (FR3) and SEQ ID NO:4 (FR4), and the domain linker is selected from (GGGGS)₃ and (GGGGS)₄.

[0179] In some trimeric embodiments, the two sdABDs each have a set of three CDRs where vhCDR1 has SEQ ID NO:32, vhCDR2 has SEQ ID NO:33, and vhCDR3 has SEQ ID NO:34. In this embodiment, the framework regions can have SEQ ID NO:1 (FR1), SEQ ID NO:2 (FR2), SEQ ID NO:3 (FR3) and SEQ ID NO:4 (FR4), and the domain linker is selected from (GGGGS)₃ and (GGGGS)₄.

[0180] In some trimeric embodiments, the two sdABDs each have a set of three CDRs where vhCDR1 has SEQ ID NO:35, vhCDR2 has SEQ ID NO:36, and vhCDR3 has SEQ ID NO:37. In this embodiment, the framework regions can have SEQ ID NO:1 (FR1), SEQ ID NO:2 (FR2), SEQ ID NO:3 (FR3) and SEQ ID NO:4 (FR4), and the domain linker is selected from (GGGGS)₃ and (GGGGS)₄.

[0181] In some trimeric embodiments, the two sdABDs each have a set of three CDRs where vhCDR1 has SEQ ID NO:38, vhCDR2 has SEQ ID NO:39, and vhCDR3 has SEQ ID NO:40. In this embodiment, the framework regions can have SEQ ID NO:1 (FR1), SEQ ID NO:2 (FR2), SEQ ID NO:3 (FR3) and SEQ ID NO:4 (FR4), and the domain linker is selected from (GGGGS)₃ and (GGGGS)₄.

[0182] In some trimeric embodiments, the two sdABDs each have a set of three CDRs where vhCDR1 has SEQ ID NO:41, vhCDR2 has SEQ ID NO:42, and vhCDR3 has SEQ ID NO:43. In this embodiment, the framework regions can have SEQ ID NO:1 (FR1), SEQ ID NO:2 (FR2), SEQ ID NO:3 (FR3) and SEQ ID NO:4 (FR4), and the domain linker is selected from (GGGGS)₃ and (GGGGS)₄.

[0183] In some trimeric embodiments, the two sdABDs each have a set of three CDRs where vhCDR1 has SEQ ID NO44:, vhCDR2 has SEQ ID NO45:, and vhCDR3 has SEQ ID NO:46. In this embodiment, the framework regions can have SEQ ID NO:1 (FR1), SEQ ID NO:2 (FR2), SEQ ID NO:3 (FR3) and SEQ ID NO:4 (FR4), and the domain linker is selected from (GGGGS)₃ and (GGGGS)₄.

[0184] In some trimeric embodiments, the two sdABDs each have a set of three CDRs where vhCDR1 has SEQ ID NO:47, vhCDR2 has SEQ ID NO:48, and vhCDR3 has SEQ ID NO:49. In this embodiment, the framework regions can have SEQ ID NO:1 (FR1), SEQ ID NO:2 (FR2), SEQ ID NO:3 (FR3) and SEQ ID NO:4 (FR4), and the domain linker is selected from (GGGGS)₃ and (GGGGS)₄.

[0185] In some trimeric embodiments, the two sdABDs each have a set of three CDRs where vhCDR1 has SEQ ID NO:50, vhCDR2 has SEQ ID NO:51, and vhCDR3 has SEQ ID NO:52. In this embodiment, the framework regions can have SEQ ID NO:1 (FR1), SEQ ID NO:2 (FR2), SEQ ID NO:3 (FR3) and SEQ ID NO:4 (FR4), and the domain linker is selected from (GGGGS)₃ and (GGGGS)₄.

[0186] In some trimeric embodiments, the two sdABDs each have a set of three CDRs where vhCDR1 has SEQ ID NO:53, vhCDR2 has SEQ ID NO:54, and vhCDR3 has SEQ ID NO:55. In this embodiment, the framework regions can have SEQ ID NO:1 (FR1), SEQ ID NO:2 (FR2), SEQ ID NO:3 (FR3) and SEQ ID NO:4 (FR4), and the domain linker is selected from (GGGGS)₃ and (GGGGS)₄.

[0187] In some trimeric embodiments, the two sdABDs each have a set of three CDRs where vhCDR1 has SEQ ID NO:56, vhCDR2 has SEQ ID NO:57, and vhCDR3 has SEQ ID NO:58. In this embodiment, the framework regions can have SEQ ID NO:1 (FR1), SEQ ID NO:2 (FR2), SEQ ID NO:3 (FR3) and SEQ ID NO:4 (FR4), and the domain linker is selected from (GGGGS)₃ and (GGGGS)₄.

[0188] In some trimeric embodiments, the two sdABDs each have a set of three CDRs where vhCDR1 has SEQ ID NO:59, vhCDR2 has SEQ ID NO:60, and vhCDR3 has SEQ ID NO:61. In this embodiment, the framework regions can have SEQ ID NO:1 (FR1), SEQ ID NO:2 (FR2), SEQ ID NO:3 (FR3) and SEQ ID NO:4 (FR4), and the domain linker is selected from (GGGGS)₃ and (GGGGS)₄.

[0189] In some trimeric embodiments, the two sdABDs each have a set of three CDRs where vhCDR1 has SEQ ID N062 vhCDR2 has SEQ ID NO:63, and vhCDR3 has SEQ ID NO:64. In this embodiment, the framework regions can have SEQ ID NO:1 (FR1), SEQ ID NO:2 (FR2), SEQ ID NO:3 (FR3) and SEQ ID NO:4 (FR4), and the domain linker is selected from (GGGGS)₃ and (GGGGS)₄.

[0190] In some trimeric embodiments, the two sdABDs each have a set of three CDRs where vhCDR1 has SEQ ID NO:65, vhCDR2 has SEQ ID NO:66, and vhCDR3 has SEQ ID NO:67. In this embodiment, the framework regions can have SEQ ID NO:1 (FR1), SEQ ID NO:2 (FR2), SEQ ID NO:3 (FR3) and SEQ ID NO:4 (FR4), and the domain linker is selected from (GGGGS)₃ and (GGGGS)₄.

[0191] In some trimeric embodiments, the two sdABDs each have a set of three CDRs where vhCDR1 has SEQ ID NO:68, vhCDR2 has SEQ ID NO:69, and vhCDR3 has SEQ ID NO:70. In this embodiment, the framework regions can have SEQ ID NO:1 (FR1), SEQ ID NO:2 (FR2), SEQ ID NO:3 (FR3) and SEQ ID NO:4 (FR4), and the domain linker is selected from (GGGGS)₃ and (GGGGS)₄.

[0192] In some trimeric embodiments, the two sdABDs each have a set of three CDRs where vhCDR1 has SEQ ID NO:71, vhCDR2 has SEQ ID NO:72, and vhCDR3 has SEQ ID NO:73. In this embodiment, the framework regions can have SEQ ID NO:1 (FR1), SEQ ID NO:2 (FR2), SEQ ID NO:3 (FR3) and SEQ ID NO:4 (FR4), and the domain linker is selected from (GGGGS)₃ and (GGGGS)₄.

[0193] In some trimeric embodiments, the two sdABDs each have a set of three CDRs where vhCDR1 has SEQ ID NO:74, vhCDR2 has SEQ ID NO:75, and vhCDR3 has SEQ ID NO:76. In this embodiment, the framework regions can have SEQ ID NO:1 (FR1), SEQ ID NO:2 (FR2), SEQ ID NO:3 (FR3) and SEQ ID NO:4 (FR4), and the domain linker is selected from (GGGGS)₃ and (GGGGS)₄.

[0194] In a particularly useful embodiment, the MASC protein is “AeroNab6mhX3” and has the sequence:

EVQLVESGGGLVQPGGSLRLSCAASGYIFGRNAMGWYRQAPGKGLELVA
GITRRGSITYYADSVKGRFTISRDNSKNTLYLQMNSLRAEDTAVYYCAA
DPASPAYGDYWGQGTQVTVSS/GGGGSGGGGSGGGGS/EVQLVESGGGL
VQPGGSLRLSCAASGYIFGRNAMGWYRQAPGKGLELVAGITRRGSITYY
ADSVKGRFTISRDNSKNTLYLQMNSLRAEDTAVYYCAADPASPAYGDYW
GQGTQVTVSS/GGGGSGGGGSGGGGS/EVQLVESGGGLVQPGGSLRLSC
AASGYIFGRNAMGWYRQAPGKGLELVAGITRRGSITYYADSVKGRFTIS
RDNSKNTLYLQMNSLRAEDTAVYYCAADPASPAYGDYWGQGTQVTVSS

[0195] In a particularly useful embodiment, the MASC protein is “AeroNab6mhX3” and has the sequence:

EVQLVESGGGLVQPGGSLRLSCAASGYIFGRNAMGWYRQAPGKGLELVA
GITRRGSITYYADSVKGRFTISRDNSKNTLYLQMNSLRAEDTAVYYCAA
DPASPAYGDYWGQGTQVTVSS/GGGGSGGGGSGGGGSGGGGS/EVQLVE
SGGGLVQPGGSLRLSCAASGYIFGRNAMGWYRQAPGKGLELVAGITRRG
SITYYADSVKGRFTISRDNSKNTLYLQMNSLRAEDTAVYYCAADPASPA
YGDYWGQGTQVTVSS/GGGGSGGGGSGGGGSGGGGS/EVQLVESGGGLV
QPGGSLRLSCAASGYIFGRNAMGWYRQAPGKGLELVAGITRRGSITYYA
DSVKGRFTISRDNSKNTLYLQMNSLRAEDTAVYYCAADPASPAYGDYWG
QGTQVTVSS

[0196] In some embodiments, the two sdABDs that make up the dimer are different. For example, in one embodiment, one of the sdABDs is “AeroNab6mh” and the other has the CDRs of NbCoV003, SEQ ID NO:21, SEQ ID NO:22 and SEQ ID NO:23.

[0197] 4. Domain Linkers

[0198] In embodiments utilizing multimeric MASC proteins, the monomers are linked recombinantly using “domain linkers”. While any suitable linker can be used, many embodiments utilize a glycine-serine polymer, including for example (GS)n, (GSGGS)n, (GGGGS)n, and (GGGS)n, where n is an integer of at least one (and generally from 3 to 4 to 5) as well as any peptide sequence that allows for recombinant attachment of the two domains with sufficient length and flexibility to allow each domain to retain its biological function. As shown in FIG. 4, the distance between the N- and C-termini of individual AeroNab6 monomers bound to spike ECD in the “down” state is 51 Å. This requires ≥15 amino acids to bridge individual subunits to simultaneously engage multiple RBD monomers. Thus, particularly preferred are (GGGGS)₃ and (GGGGS)₄ linkers. As shown in FIG. 23 both (GGGGS)₃ and (GGGGS)₄ linkers in the trimeric constructs show both good binding to the spike protein trimer as measured by SPR.

[0199] 5. Half-Life Extension Domains

[0200] The MASC proteins optionally include half-life extension domains, that allow for increased half-life in physiological environments such as plasma and lung tissue. Such domains are contemplated to include, but are not limited to, HSA binding domains, either scFvs or sdABDs, as well as all or part of human serum albumin, as discussed below.

[0201] Human serum albumin (HSA) (molecular mass ˜67 kDa) is the most abundant protein in plasma, present at about 50 mg/ml (600 uM), and has a half-life of around 20 days in humans. HSA serves to maintain plasma pH, contributes to colloidal blood pressure, functions as carrier of many metabolites and fatty acids, and serves as a major drug transport protein in plasma.

[0202] Noncovalent association with albumin extends the elimination half-time of short lived proteins. For example, a recombinant fusion of an albumin binding domain to a Fab fragment resulted in a reduced in vivo clearance of 25- and 58-fold and a half-life extension of 26- and 37-fold when administered intravenously to mice and rabbits respectively as compared to the administration of the Fab fragment alone. In another example, when insulin is acylated with fatty acids to promote association with albumin, a protracted effect was observed when injected subcutaneously in rabbits or pigs. Together, these studies demonstrate a linkage between albumin binding and prolonged action.

[0203] In one aspect, the antigen-binding proteins described herein comprise a half-life extension domain, for example a domain which specifically binds to HSA, that is attached either N- or C-terminal to the MASC protein. In many embodiments, the half-life extension domain is a single domain antigen binding domain from a single domain antibody that binds to HSA. This domain is generally referred to herein as “sdABD” to human HSA (sdABD-HSA), or alternatively “sdABD(½)”, to distinguish these binding domains from the sdABDs to the spike protein. Suitable sdABD-HSA domains are well known in the art, see for example U.S. Pat. No. 8,703,131, the sequences of all sdABD-HSA domains therein (“ALB”, including specifically ALB1, ALB3, ALB4, ALB5, ALB6, ALB7, ALB8, ALB9 and ALB10) are expressly incorporated by reference. Similarly, U.S. Pat. No. 10,100,106 contains additional single domain albumin binding domains, the sequences of which are also specifically incorporated by reference herein, including SEQ ID NOs:4, 7, 9, 26 and 27.

[0204] Another suitable half-life domain that can be fused to the MASC proteins is all or part of human HSA itself, again, either N- or C-terminal. HSA is a relatively small protein, roughly 65 amino acids long, and can be fused to one or more of the monomeric MASC proteins as will be appreciated by those in the art.

[0205] The half-life extension domain of an antigen binding protein provides for altered pharmacodynamics and pharmacokinetics of the MASC proteins. As above, the half-life extension domain extends the elimination half-time. The half-life extension domain also alters pharmacodynamic properties including alteration of tissue distribution, penetration, and diffusion of the antigen-binding protein.

[0206] D. Method of Making MASC Proteins

[0207] The MASC proteins and fusion proteins of the invention are made as will generally be appreciated by those in the art and outlined below.

[0208] The invention provides nucleic acid compositions that encode the MASC compositions of the invention. As is known in the art, the nucleic acids encoding the compositions of the invention can be incorporated into expression vectors as is known in the art, and depending on the host cells used to produce the MASC proteins of the invention. Generally, the nucleic acids are operably linked to any number of regulatory elements (promoters, origin of replication, selectable markers, ribosomal binding sites, inducers, etc.). The expression vectors can be extra-chromosomal or integrating vectors.

[0209] The nucleic acids and/or expression vectors of the invention are then transformed into any number of different types of host cells as is well known in the art, including mammalian, bacterial, yeast, insect and/or fungal cells, with mammalian cells (e.g. CHO cells, 293 cells), finding use in many embodiments.

[0210] The MASC proteins, including MASC fusion proteins, of the invention are made by culturing host cells comprising the expression vector(s) as is well known in the art under conditions that result in the expression of the proteins, followed by purification.

[0211] E. Formulations

[0212] Formulations of the MASC proteins used in accordance with the present invention are prepared for storage by mixing the proteins having the desired degree of purity with optional pharmaceutically acceptable carriers, excipients or stabilizers (as generally outlined in Remington's Pharmaceutical Sciences 16th edition, Osol, A. Ed. [1980]), in the form of lyophilized formulations or aqueous solutions.

[0213] F. Administration of the MASC Proteins

[0214] The compositions of the invention comprising MASC proteins and MASC fusion proteins that are administered to a patient to prevent, treat or neutralize the SC2 virus or SC2 viral infection in a patient. As recently reported, it appears that the highest ACE2 expression in humans is in the nose with decreasing expression throughout the lower respiratory tract, corresponding to a gradient of SC2 infection from high in the proximal nasal passages to lower in the distal areas such as peripheral lung (see Hou et al, https://doi.org/10.1016/j.cell.2020.05.042), supporting an early hypothesis that nasal surfaces might be the dominant initial site for infection. The infection then proceeds to the lungs.

[0215] Accordingly, as will be appreciated by the art, there are a number of different administration routes which can be utilized to administer the MASC proteins of the invention, including, but not limited to, pulmonary delivery using inhalation techniques, intranasal delivery using particular formulations and intravenous administration, as outlined herein.

[0216] 1. Inhalation Therapy

[0217] Thus, in some embodiments, the MASC proteins are administered to a patient's pulmonary system, including the lungs. Thus, the invention provides for the delivery of the MASC proteins (including MASC fusion proteins) of the invention to the respiratory tract.

[0218] One benefit of the MASC proteins of the invention is that they are extremely stable and thus can be lyophilized, as is known in the art. The lyophilized proteins can then be reconstituted at a later date into a liquid formulation and then aerosolized through nebulization for direct delivery to the patient's pulmonary system. See for example U.S. Pat. Nos. 9,393,304 which describes a number of lyophilization techniques, conditions and formulations for Nanobodies™ that are for inhalation therapy.

[0219] In certain embodiments, the formulations can be administered using nebulizers. Examples of nebulizers include, in non-limiting examples, jet nebulizers, ultrasonic nebulizers, and vibrating mesh nebulizers. These classes use different methods to create an aerosol from a liquid. In general, any aerosol-generating device that can maintain the integrity of the protein in these formulations is suitable for delivery of formulations as described herein.

[0220] In some embodiments, a vibrating-mesh nebulizers is used. Vibrating-mesh nebulizers are divided into passively and actively vibrating-mesh devices (Newman 2005, J. Appl. Ther. Res. 5: 29-33). Passively vibrating-mesh devices (e.g. Omron MICROAIR.®. NE-U22 nebulizer) employ a perforated plate having up to 6000 micron sized holes. A vibrating piezo-electric crystal attached to a transducer horn induces “passive” vibrations in the perforated plate positioned in front of it, resulting in extrusion of fluid through the holes and generation of the aerosol. Actively vibrating-mesh devices (e.g. AERONEB.®. Pro nebulizer) may employ a “micropump” system which comprises an aerosol generator consisting of a plate with up to 1000 dome-shaped apertures and a vibrating element which contracts and expands on application of an electric current. This results in upward and downward movements of the mesh by a few micrometers, extruding the fluid and generating the aerosol. Other examples of vibrating-mesh nebulizers include the Akita2 Apixneb (Activaero, now Vectura, Germany), EFLOW.®. (PARI GmbH, Grafelingen, Germany; see also U.S. Pat. No. 5,586,550), AERONEB.®. (Aerogen, Inc., Sunnyvale, Calif.; see also U.S. Pat. Nos. 5,586,550; 5,938,117; 6,014,970; 6,085,740; 6,205,999), or the FOX nebulizer (Activaero, now Vectura, Germany), all adapted for pediatric use.

[0221] In some embodiments, a continuous flow nebuliser is used, particularly in cases where COVID19 patients may require oxygen as well, so continuous flow can be used to maintain a continuous oxygen or air supply to the patient. Accordingly, the nebulizer can be used with or without additional air or 02 flow. Preferably, the nebulizer is used with additional air or O₂ flow, such as a flow of 2 L/min additional air or O₂.

[0222] An exemplary inhalation device for delivering the polypeptide of the invention to a patient may comprises (a) an aerosol generator with a vibratable mesh; (b) a reservoir for a liquid to be nebulised, said reservoir being in fluid connection with the vibratable mesh; (c) a gas inlet opening; (d) a face mask, having a casing, an aerosol inlet opening, a patient contacting surface, and a one-way exhalation valve or a two-way inhalation/exhalation valve in the casing having an exhalation resistance selected in the range from 0.5 to 5 mbar; and (e) a flow channel extending from the gas inlet opening to the aerosol inlet opening of the face mask, the flow channel having a lateral opening through which the aerosol generator is at least partially inserted into the flow channel, and a constant flow resistance between the gas inlet opening and the aerosol inlet opening of the face mask at a flow rate of 1 to 20 L/min.

[0223] Additional methods for delivery to the respiratory tract and/or delivery by inhalation are known to the skilled person and are e.g. described in the handbook “Drug Delivery: Principles and Applications” (2005) by Binghe Wang, Teruna Siahaan and Richard Soltero (Eds. Wiley Interscience (John Wiley & Sons)); in “Pharmacology PreTest.™. (11.sup.th Ed.) Self-Assessment and Review” by Rosenfeld G. C., Loose-Mitchell D. S.; and in “Pharmacology” (3.sup.rd Edition) by Lippincott Williams & Wilkins, New York; Shlafer M. McGraw-Hill Medical Publishing Division, New York; Yang K. Y., Graff L. R., Caughey A. B. Blueprints Pharmacology, Blackwell Publishing.

[0224] The present invention also relates to a pharmaceutical device suitable for the delivery by inhalation of the MASC proteins of the invention and suitable in the use of a composition comprising the same. The present invention, accordingly, relates to such a device comprising the MASC proteins of the invention at the selected dose.

[0225] Various inhalation systems are e.g. described on pages 129 to 148 in the review (“Pulmonary Drug Delivery”, Bechtold-Peters and Luessen, eds., supra). In the method of the present invention, the device is an inhaler for liquids (e.g. a suspension of fine solid particles or droplets) comprising the polypeptide of the invention. Preferably this device is an aerosol delivery system or a nebulizer comprising the polypeptide of the invention.

[0226] The aerosol delivery system used in the method of the invention may comprise a container comprising the composition of the invention and an aerosol generator connected to it. The aerosol generator is constructed and arranged to generate an aerosol of the composition of the invention.

[0227] 2. Intranasal Adminstration

[0228] As discussed above, it appears that the nasal cavity and nasal surfaces might be the dominant initial site for SC2 viral infection, as evidenced by the high ACE2 expression patterns.

[0229] Accordingly, in some embodiments the MASC proteins, including MASC fusion proteins, are administered via nasal administration as a nasal spray. There are a wide variety of delivery systems for intranasal administration of the MASC proteins, ranging from simple drops or sprays to unit dosing systems for liquids; see for example Marx et al., Intranasal Drug Administration—An Attractive Delivery Route for Some Drugs; DOI: 10.5772/59468. As above, the MASC proteins can be lyophilized and then reconstituted for nasal administration or administered directly as a liquid with lyophilization.

[0230] 3. Intravenous Administration

[0231] Additionally, as will be appreciated by those in the art, the MASC proteins of the invention can also be administered intravenously.

[0232] G. Methods of Diagnosing SC Viral Infection

[0233] In some embodiments, one or more MASC proteins as described herein can be used to detect SARS-CoV2 in a biological or non-biological sample. For example, MASC proteins reagents can be used in assays to detect the presence or absence of, or protein expression levels, for SARS-CoV2 using any of a number of immunoassays known to those skilled in the art. Immunoassay techniques and protocols are generally described in Price and Newman, “Principles and Practice of Immunoassay,” 2nd Edition, Grove's Dictionaries, 1997; and Gosling, “Immunoassays: A Practical Approach,” Oxford University Press, 2000. A variety of immunoassay techniques, including competitive and non-competitive immunoassays, can be used. See, e.g., Self et al., Curr. Opin. Biotechnol., 7:60-65 (1996). The term immunoassay encompasses techniques including, without limitation, enzyme immunoassays (EIA) such as enzyme multiplied immunoassay technique (EMIT), enzyme-linked immunosorbent assay (ELISA), IgM antibody capture ELISA (MAC ELISA), and microparticle enzyme immunoassay (MEIA); capillary electrophoresis immunoassays (CEIA); radioimmunoassays (RIA); immunoradiometric assays (IRMA); fluorescence polarization immunoassays (FPIA); and chemiluminescence assays (CL). If desired, such immunoassays can be automated. Immunoassays can also be used in conjunction with laser induced fluorescence. See, e.g., Schmalzing et al., Electrophoresis, 18:2184-93 (1997); Bao, J. Chromatogr. B. Biomed. Sci., 699:463-80 (1997). Liposome immunoassays, such as flow-injection liposome immunoassays and liposome immunosensors, are also suitable for use in the present invention. See, e.g., Rongen et al., J. Immunol. Methods, 204:105-133 (1997). In addition, nephelometry assays, in which the formation of protein/antibody complexes results in increased light scatter that is converted to a peak rate signal as a function of the protein concentration, are suitable for use in the methods of the present invention. Nephelometry assays are commercially available from Beckman Coulter (Brea, Calif.; Kit #449430) and can be performed using a Behring Nephelometer Analyzer (Fink et al., J. Clin. Chem. Clin. Biochem., 27:261-276 (1989)).

[0234] Specific immunological binding of the MASC proteins to SARS-CoV2 can be detected directly or indirectly. Direct labels include fluorescent or luminescent tags, metals, dyes, radionuclides, and the like, attached to the antibody. A MASC protein labeled with iodine-125 (1251) can be used. A chemiluminescence assay using a chemiluminescent antibody specific for the nucleic acid is suitable for sensitive, non-radioactive detection of protein levels. A MASC proteins labeled with fluorochrome is also suitable. Examples of fluorochromes include, without limitation, DAPI, fluorescein, Hoechst 33258, R-phycocyanin, B-phycoerythrin, R-phycoerythrin, rhodamine, Texas red, and lissamine. Indirect labels include various enzymes well known in the art, such as horseradish peroxidase (HRP), alkaline phosphatase (AP), (β-galactosidase, urease, and the like. A horseradish-peroxidase detection system can be used, for example, with the chromogenic substrate tetramethylbenzidine (TMB), which yields a soluble product in the presence of hydrogen peroxide that is detectable at 450 nm. An alkaline phosphatase detection system can be used with the chromogenic substrate p-nitrophenyl phosphate, for example, which yields a soluble product readily detectable at 405 nm. Similarly, a β-galactosidase detection system can be used with the chromogenic substrate o-nitrophenyl-β-D-galactopyranoside (ONPG), which yields a soluble product detectable at 410 nm. An urease detection system can be used with a substrate such as urea-bromocresol purple (Sigma Immunochemicals; St. Louis, Mo.).

[0235] A signal from the direct or indirect label can be analyzed, for example, using a spectrophotometer to detect color from a chromogenic substrate; a radiation counter to detect radiation such as a gamma counter for detection of 125I; or a fluorometer to detect fluorescence in the presence of light of a certain wavelength. For detection of enzyme-linked antibodies, a quantitative analysis can be made using a spectrophotometer such as an EMAX Microplate Reader (Molecular Devices; Menlo Park, Calif.) in accordance with the manufacturer's instructions. If desired, the assays of the present invention can be automated or performed robotically, and the signal from multiple samples can be detected simultaneously.

[0236] The MASC proteins can be immobilized onto a variety of solid supports, such as magnetic or chromatographic matrix particles, the surface of an assay plate (e.g., microtiter wells), pieces of a solid substrate material or membrane (e.g., plastic, nylon, paper), in the physical form of sticks, sponges, papers, wells, and the like. An assay strip can be prepared by coating the antibody or a plurality of antibodies in an array on a solid support. This strip can then be dipped into the test sample and processed quickly through washes and detection steps to generate a measurable signal, such as a colored spot.

[0237] H. Methods of Screening for Antigen Binding Domains

[0238] Also provided herein are methods to screen for other ABDs that compete for binding with the present MASC proteins. The term “compete”, as used herein with regard to an ABD, means that a first ABD, or an antigen-binding portion thereof, competes for binding with a second ABD, or an antigen-binding portion thereof, where binding of the first ABD with its cognate epitope is detectably decreased in the presence of the second ABD compared to the binding of the first ABD in the absence of the ABD antibody. The alternative, where the binding of the second ABD to its epitope is also detectably decreased in the presence of the first ABD, can, but need not be the case. That is, a first ABD can inhibit the binding of a second ABD to its epitope without that second ABD inhibiting the binding of the first ABD to its respective epitope. However, where each ABD detectably inhibits the binding of the other ABD with its cognate epitope or ligand, whether to the same, greater, or lesser extent, the ABDs are said to “cross-compete” with each other for binding of their respective epitope(s). Both competing and cross-competing ABD are encompassed by the present invention. Regardless of the mechanism by which such competition or cross-competition occurs (e.g., steric hindrance, conformational change, or binding to a common epitope, or portion thereof, and the like), the skilled artisan would appreciate, based upon the teachings provided herein, that such competing and/or cross-competing ABDs are encompassed and can be useful for the methods disclosed herein.

[0239] Numerous types of competitive binding assays are known, for example: solid phase direct or indirect radioimmunoassay (RIA), solid phase direct or indirect enzyme immunoassay (EIA), sandwich competition assay (see Stahli et al., Methods in Enzymology 9:242-253 (1983)); solid phase direct biotin-avidin EIA (see Kirkland et al., J. Immunol. 137:3614-3619 (1986)); solid phase direct labeled assay, solid phase direct labeled sandwich assay (see Harlow and Lane, Antibodies, A Laboratory Manual, Cold Spring Harbor Press (1988)); solid phase direct label RIA using I-125 label (see Morel et al., Molec. Immunol. 25(1):7-15 (1988)); solid phase direct biotin-avidin EIA (Cheung et al., Virology 176:546-552 (1990)); and direct labeled RIA (Moldenhauer et al., Scand. J. Immunol. 32:77-82 (1990)). Typically, such an assay involves the use of purified antigen bound to a solid surface or cells bearing either of these, an unlabelled test immunoglobulin and a labeled reference immunoglobulin. Competitive inhibition is measured by determining the amount of label bound to the solid surface or cells in the presence of the test immunoglobulin. Usually the test immunoglobulin is present in excess. Antibodies identified by competition assay (competing antibodies) include antibodies binding to the same epitope as the reference antibody and antibodies binding to an adjacent epitope sufficiently proximal to the epitope bound by the reference antibody for steric hindrance to occur. Usually, when a competing antibody is present in excess, it will inhibit specific binding of a reference antibody to a common antigen by at least 50 or 75%.

[0240] Competitive binding assays can be used to identify antibodies that compete with an antibody described herein for specific binding to the SARS-CoV2 virus. Any of a number of competitive binding assays known in the art can be used to measure competition between two antibodies to the same antigen. Briefly, the ability of different antibodies to inhibit the binding of another antibody is tested. For example, antibodies can be differentiated by the epitope to which they bind using a sandwich ELISA assay. This is carried out by using a capture antibody to coat the surface of a well. A subsaturating concentration of tagged-antigen is then added to the capture surface. This protein will be bound to the antibody through a specific antibody:epitope interaction. After washing a second antibody, which has been covalently linked to a detectable moiety (e.g., HRP, with the labeled antibody being defined as the detection antibody) is added to the ELISA. If this antibody recognizes the same epitope as the capture antibody it will be unable to bind to the target protein as that particular epitope will no longer be available for binding. If however this second antibody recognizes a different epitope on the target protein it will be able to bind and this binding can be detected by quantifying the level of activity (and hence antibody bound) using a relevant substrate. The background is defined by using a single antibody as both capture and detection antibody, whereas the maximal signal can be established by capturing with an antigen specific antibody and detecting with an antibody to the tag on the antigen. By using the background and maximal signals as references, antibodies can be assessed in a pair-wise manner to determine epitope specificity.

[0241] A first antibody is considered to competitively inhibit binding of a second antibody, if binding of the second antibody to the antigen is reduced by at least 30%, usually at least about 40%, 50%, 60% or 75%, and often by at least about 90%, in the presence of the first antibody using any of the assays described above.

### IV. EXAMPLES

### 1.1 Example 1

### Identification and Characterization of Parental MASC Proteins

[0242] (a) Binding of Yeast-Surface Displayed Nanobodies to SARS-CoV2 Spike Ectodomain

[0243] Yeast displaying a single nanobody clone on the surface were assessed for binding to purified fluorescently labeled SARS-CoV2 Spike ectodomain by flow cytometry. Approximately 1×10⁶ yeast were incubated with SARS-CoV2 Spike ectodomain (Spike ECD) or the receptor binding domain (RBD) labeled with Alexa647 for 30 minutes at 25 C. After extensive washing of yeast by repeated centrifugation and resuspension, the amount of SARS-CoV2 Spike ectodomain bound to yeast cells was measured by flow cytometry. Nanobody clones that bind to SARS-CoV2 Spike ectodomain showed strong fluorescence signal in the Alexa647 channel. Binding to SARS-CoV2 Spike ectodomain was decreased in the presence of 1.4 micromolar purified ACE2-Fc, indicative of an epitope that is competitive with human ACE2.

TABLE 1

| | | Spike | Spike ECD + |
|---|---|---|---|
| | RBD- | ECD | ACE2-Fc |
| | (10 nM) | (1 nM) | (1.4 μM) |
| pNbCOV001B | +++ | +++ | − |
| pNbCOV005A | +++ | +++ | − |
| pNbCOV006A | +++ | +++ | − |
| pNbCOV008C | ++ | + | − |
| pNbCOV010B | ++ | +++ | + |
| pNbCOV011A | +++ | +++ | − |
| pNbCOV012C | +++ | +++ | − |
| pNbCOV015A | ++ | +++ | − |
| pNbCOV016A | +++ | +++ | − |
| pNbCOV019A | + | +++ | − |
| pNbCOV021A | ++ | +++ | − |
| pNbCOV022A | + | +++ | − |
| pNbCOV024B | + | +++ | − |
| pNbCOV002C | − | +++ | − |
| pNbCOV003A | − | +++ | + |
| pNbCOV004B | − | +++ | − |
| pNbCOV013A | − | +++ | + |
| pNbCOV017A | − | +++ | − |
| pNbCOV018A | − | +++ | − |

+++: Strong signal
++: Medium signal
+: Low signal
−: No Signal

[0244] (b) Surface Plasmon Resonance of Nanobodies to Spike Ectodomain (ECD).

[0245] Stabilized SARS-CoV2 ectodomain bearing a C-terminal 8× histidine tag and a Twin-strep-tag was expressed in Expi293 cells and purified using metal-affinity chromatography and size exclusion chromatography. This antigen was captured on a Cytiva surface plasmon resonance chip via Streptactin XT to analyze the kinetic properties of nanobodies raised against the SARS-CoV2 Spike ectodomain. The results are shown in FIG. 22.

### 1.2 Example 2

### Affinity Maturation

[0246] One of the clones described in Example 1 was affinity-matured. The original clone was pNbCOV006A, with the sequence as follows (CDRs underlined):

QVQLVESGGGLVQAGGSLRLSCAASGIIFGRNAMGWYRQAPGKERELVA
GITRRGSITYYADSVKGRFTISRDNAKNTVYLQMNSLKPEDTAVYYCAA
DPASPAPGDYWGQGTQVTVSS

[0247] (a) Affinity Maturation Process:

[0248] A saturation mutagenesis library of the original clone was generated by degenerate oligonucleotides encoding all 20 amino acids at each position within CDR1, CDR2, and CDR3. This library of variants was displayed on the surface of yeast. High affinity clones were progressively selected with stringent criteria, i.e. decreasing concentrations of the SARS-Cov2 Spike protein receptor binding domain (RBD). After two rounds of selection, a pool of yeast displaying nanobody variants showed higher affinity binding to the Spike RBD compared to the parent nanobody as outlined in the FIG. 2.

[0249] (b) Affinity Maturation Library Outcome:

[0250] Eight individual clones were sequenced from this pool, demonstrating that mutations at the following positions were responsible for improved affinity. Additionally, combinations of the substitutions below may yield improvements in affinity to the parent clone.

[0251] CDR1

[0252] Original: GIIFGRNA

[0253] Substitutions to position 3: Y/W/F/V/L

[0254] CDR2

[0255] Original: TRRGSITY

[0256] Substitutions to position 4: H/Y/G/Q

[0257] CDR3

[0258] Original: AADPASPAPGDY

[0259] Substitutions to position 6: V/L/I/T

[0260] Substitutions to position 9: F/W/Y/L/V

[0261] Based on sequence convergence, we specifically tested the activity of one clone (mNbCOV6). Underlines represent substitutions compared to the parent:

QVQLVESGGGLVQAGGSLRLSCAASGYIFGRNAMGWYRQAPGKERELVA
GITRRGSITYYADSVKGRFTISRDNAKNTVYLQMNSLKPEDTAVYYCAA
DPASPAYGDYWGQGTQVTVSS

CDR1
GYIFGRNA
CDR2
TRRGSITY
CDR3
AADPASPAYGDY

[0262] mNbCOV6 is significantly more potent than the parent clone NbCOV6. HEK293 cells expressing the angiotensin converting enzyme 2 (ACE2) receptor were incubated with 1 nM purified, stabilized SARS-CoV2 Spike ectodomain fluorescently conjugated with an Alexa 647 dye in the presence of increasing concentrations of either the parent nanobody (NbCOV6) or the affinity matured nanobody (mNbCOV6). NbCOV6 inhibited Spike ectodomain binding with an EC50 of 359 nM while the affinity matured nanobody (mNbCOV6) has an EC50 of 0.056 nM. The same assay was repeated with fluorescently labeled SARS-CoV2 Spike receptor binding domain (RBD). The parent NbCOV6 inhibited RBD binding with an EC50 of 190 nM while the affinity mNbCOV6 inhibited with an EC50 of 1.5 nM.

TABLE 3

| | RBD inhibition | | Spike trimer inhibition | |
|---|---|---|---|---|
| | EC50 | | EC50 | |
| Parent clone | 190 | nM | 359 | nM |
| (NbCOV6) | | | | |
| Affinity matured | 1.5 | nM | 0.056 | nM |
| (mNbCOV6) | | | | |

### 1.3 Example 3

### Pseudovirus Neutralization Assay

[0263] ZsGreen SARS-CoV-2-pseudotyped lentivirus was generated according to a published protocol (https://www.mdpi.com/1999-4915/12/5/513). The day before transduction, 50,000 HEK293T-ACE2 cells were plated in each well of a 24-well plate. 10-fold serial dilutions of nanobody were generated in complete medium (DMEM+10% FBS+PSG) and pseudotyped virus was added to a final volume of 200 ul. The media over the cells was replaced with nanobody/pseudotyped virus mixture for four hours, then removed. Cells were washed with complete medium and then incubated in complete medium. 3 days post-transduction, cells were trypsinized and the proportion of ZsGreen+cells was measured on an Attune flow cytometer (Thermo Fisher).

### 1.4 Example 4

### An Ultra-Potent Synthetic Nanobody Neutralizes SARS-CoV-2 by Stabilizing Inactive Spike

[0264] The SARS-CoV-2 virus enters host cells via an interaction between its Spike protein and the host cell receptor angiotensin converting enzyme 2 (ACE2). By screening a yeast surface-displayed library of synthetic nanobody sequences, we developed nanobodies that disrupt the interaction between Spike and ACE2. Cryogenic electron microscopy (cryo-EM) revealed that one nanobody, Nb6, binds Spike in a fully inactive conformation with its receptor binding domains (RBDs) locked into their inaccessible down-state, incapable of binding ACE2. Affinity maturation and structure-guided design of multivalency yielded a trivalent nanobody, mNb6-tri, with femtomolar affinity for Spike and picomolar neutralization of SARS-CoV-2 infection. mNb6-tri retains function after aerosolization, lyophilization, and heat treatment, which enables aerosol-mediated delivery of this potent neutralizer directly to the airway epithelia.

[0265] Single domain antibodies (nanobodies) were isolated that neutralize SARS-CoV-2 by screening a yeast surface-displayed library of >2×10⁹ synthetic nanobody sequences for binders to the Spike ectodomain (17). A mutant form of SARS-CoV-2 Spike (Spike^{S2P}) was used as the antigen (15). Spike^{S2P} lacks one of the two proteolytic cleavage sites between the S1 and S2 domains and introduces two mutations and a trimerization domain to stabilize the pre-fusion conformation. Spike^{S2P} was labeled with biotin or with fluorescent dyes and selected nanobody-displaying yeast over multiple rounds, first by magnetic bead binding and then by fluorescence-activated cell sorting (FIG. 27A).

[0266] Three rounds of selection yielded 21 unique nanobodies that bound Spike^{S2P} and showed decreased binding in the presence of a dimeric construct of the ACE2 extracellular domain (ACE2-Fc). These nanobodies fall into two classes. Class I binds the RBD and competes directly with ACE2-Fc (FIG. 27B). A prototypical example of this class is nanobody Nb6, which binds to Spike^{S2P} and to RBD alone with a KD of 210 nM and 41 nM, respectively (FIG. 27C; FIG. 42). Class II, exemplified by nanobody Nb3, binds to Spike^{S2P} (KD=61 nM), but displays no binding to RBD alone (FIG. 27C, FIG. 42). In the presence of excess ACE2-Fc, binding of Nb6 and other Class I nanobodies is blocked entirely, whereas binding of Nb3 and other Class II nanobodies is moderately decreased (FIG. 27B). These results suggest that Class I nanobodies target the RBD to block ACE2 binding, whereas Class II nanobodies target other epitopes. Indeed, surface plasmon resonance (SPR) experiments demonstrate that Class I and Class II nanobodies can bind Spike^{S2P} simultaneously (FIG. 27D).

[0267] Class I nanobodies show a consistently faster association rate constant (ka) for nanobody binding to the isolated RBD than to Spike^{S2P} (FIG. 41), which suggests that RBD accessibility influences the KD. Next, the efficacy of Class I and Class II nanobodies was tested to inhibit binding of fluorescently labeled Spike^{S2P} to ACE2-expressing HEK293 cells (FIG. 27E; FIG. 42). Class I nanobodies Nb6 and Nb11 emerged as two of the most potent clones with IC50 values of 370 and 540 nM, respectively. Class II nanobodies showed little to no activity in this assay. Two Class I nanobodies were prioritized, Nb6 and Nb11, that combine potent Spike^{S2P} binding with relatively small differences in Ka between binding to Spike^{S2P} or RBD. For Class II nanobodies, we prioritized Nb3 because of its relative yield during purification (FIG. 42).

[0268] To define the binding sites of Nb6 and Nb11, the cryogenic electron microscopy (cryo-EM) structures bound to Spike^{S2P} were determined (FIG. 28A-B; FIG. 27-29; FIG. 44). Both nanobodies recognize RBD epitopes that overlap the ACE2 binding site (FIG. 28E). For Nb6 and Nb11, we resolved nanobody binding to both the open and closed conformations of Spike^{S2P}. We obtained a 3.0 Å map of Nb6 bound to closed Spike^{S2P}, which enabled modeling of the Nb6-Spike^{S2P} complex (FIG. 28A), including the complementarity determining regions (CDRs). We also obtained lower resolution maps for Nb6 bound to open Spike^{S2P} (3.8 Å), and Nb11 bound to open and closed Spike^{S2P} (4.2 Å, and 3.7 Å, respectively). For these lower resolution maps, we could define the nartobody's binding orientation but not accurately model the CDRs.

[0269] Nb6 bound to closed Spike^{S2P} straddles the interface between two adjacent RBDs. The majority of the contacting surfaces are contributed by CDR1 and CDR2 of Nb6 (FIG. 28C). CDR3 contacts the adjacent RBD positioned counterclockwise when viewed from the top (FIG. 28C). The binding of one Nb6 therefore stabilizes two adjacent RBDs in the down-state and likely pre-organizes the binding site for a second and third Nb6 molecule to stabilize the closed Spike conformation. By contrast, Nb11 bound to down-state RBDs only contacts a single RBD (FIG. 28D).

[0270] The structure of Nb6 bound to closed Spike^{S2P} enabled us to engineer bivalent and trivalent nanobodies predicted to lock all RBDs in the down-state. We inserted flexible Gly-Ser linkers of either 15 or 20 amino acids to span the 52 Å distance between adjacent Nb6 monomers bound to down-state RBDs in closed Spike^{S2P} (FIG. 36). These linkers are too short to span the 72 Å distance between Nb6 molecules bound to open Spike. Moreover, steric clashes would prevent binding of three RBDs in open Spike with a single up-state RBD even with longer linker length (FIG. 36). By contrast, the minimum distance between adjacent Nb11 monomers bound to either open or closed Spike^{S2P} is 68 Å. We predicted that multivalent binding by Nb6 constructs would display significantly slowed dissociation rates due to enhanced avidity.

[0271] In SPR experiments, both bivalent Nb6 with a 15 amino acid linker (Nb6-bi) and trivalent Nb6 with two 20 amino acid linkers (Nb6-tri) dissociate from Spike^{S2P} in a biphasic manner. The dissociation phase can be fitted to two components: a fast phase with kinetic rate constants kd1 of 2.7×10-2s-1 for Nb6-bi and 2.9×10-2s-1 for Nb6-tri, which are close to that observed for monovalent Nb6 (kd=5.6×10-2s-1) and a slow phase that is dependent on avidity (kd2=3.1×10-4s-1 for Nb6-bi and kd2<1.0×10-6s-1 for Nb6-tri, respectively) (FIG. 29A). The relatively similar Kd for the fast phase suggests that a fraction of the observed binding for the multivalent constructs is nanobody binding to a single Spike^{S2P} RBD. By contrast, the slow dissociation phase of Nb6-bi and Nb6-tri indicates engagement of two or three RBDs. No dissociation was observed for the slow phase of Nb6-tri over 10 minutes, indicating an upper boundary for kd2 of 1×10-6s-1 and subpicomolar affinity. This measurement remains an upper boundary estimate because the measurement is limited by the intrinsic dissociation rate of Spike^{S2P} from the SPR chip imposed by the chemistry used to immobilize Spike^{S2P}. The true dissociation rate, therefore, may be significantly lower.

[0272] Biphasic dissociation could be explained by a slow interconversion between up- and down-state RBDs, with conversion to the more stable down-state required for multivalent binding: a single domain of Nb6-tri engaged with an up-state RBD would dissociate rapidly. The system would then re-equilibrate as the RBD flips into the down-state, eventually allowing Nb6-tri to trap all RBDs in closed Spike^{S2P}. To test this directly, the association time was varied for Nb6-tri binding to Spike^{S2P}. Indeed, we observed an exponential decrease in the percent fast-phase with a t^{1/2} of 65 s (FIG. 29B), which, we surmise, reflects the timescale of conversion between the RBD up- and down-states in Spike^{S2P}. Taken together, dimerization and trimerization of Nb6 afforded 750-fold and >200,000-fold gains in KD, respectively.

[0273] Unable to determine the binding site of Nb3 by cryo-EM, radiolytic hydroxyl radical footprinting was used. apo- or Nb3-bound Spike^{S2P} were exposed to synchrotron X-ray radiation to label solvent-exposed amino acids with hydroxyl radicals, which was subsequently quantified by mass spectrometry of protease digested Spike^{S2P}(18). Two neighboring surface residues on the S1 N-terminal domain of Spike (M177 and H207) were protected in the presence of Nb3 at a level consistent with prior observations of antibody-antigen interactions by hydroxyl radical footprinting (FIG. 37)(19). Previously discovered coronavirus neutralizing antibodies bind an epitope within the N-terminal domain of Spike with Fab fragments that are non-competitive with the host cell receptor (20, 21). Further SPR experiments demonstrated that Nb3 can bind Spike^{S2P} simultaneously with monovalent ACE2 (FIG. 38). It was hypothesized that multivalent display of Nb3 on the surface of yeast may account for the partial decrease in Spike^{S2P} binding observed in the presence of ACE2-Fc. Indeed, a trivalent construct of Nb3 with 15 amino acid linkers (Nb3-tri) inhibited Spike^{S2P} binding to ACE2 cells with an IC50 of 41 nM (FIG. 38). How Nb3-tri disrupts Spike-ACE2 interactions remains unclear.

[0274] Next, the neutralization activity of monovalent and trivalent versions of our top Class I (Nb6 and Nb11) and Class II (Nb3) nanobodies was tested against SARS-CoV-2 pseudotyped lentivirus using a previously described assay (22). Nb6 and Nb11 inhibited pseudovirus infection with IC50 values of 2.0 μM and 2.4 μM, respectively. Nb3 inhibited pseudovirus infection with an IC50 of 3.9 μM (FIG. 29C, FIG. 42). Nb6-tri shows a 2000-fold enhancement of inhibitory activity, with an IC50 of 1.2 nM, whereas trimerization of Nb11 and Nb3 resulted in more modest gains of 40- and 10-fold (51 nM and 400 nM), respectively (FIG. 29C). The neutralization activities were confirmed with a viral plaque assay using live SARS-CoV-2 virus infection of VeroE6 cells. Here, Nb6-tri proved exceptionally potent, neutralizing SARS-CoV-2 with an average IC50 of 160 pM (FIG. 29D). Nb3-tri neutralized SARS-CoV-2 with an average IC50 of 140 nM (FIG. 29D).

[0275] The potency of Nb6 was optimized by selecting a saturation mutagenesis library targeting all three CDRs. Two rounds of selection identified high-affinity clones with two penetrant mutations: I27Y in CDR1 and P105Y in CDR3. We incorporated these mutations into Nb6 to generate matured Nb6 (mNb6), which binds with 500-fold increased affinity to Spike^{S2P} (FIG. 30A). mNb6 inhibits both pseudovirus and live SARS-CoV-2 infection with low nanomolar potency, a ˜200-fold improvement compared to Nb6 (FIG. 30B; FIG. 42).

[0276] A 2.9 Å cryo-EM structure shows that mNb6 binds to closed Spike^{S2P} (FIG. 30C; FIG. 32). mNb6 induces a slight rearrangement of the down-state RBDs as compared to Spike^{S2P} bound to Nb6, inducing a 9° rotation of the RBD away from the central three-fold symmetry axis. This deviation likely arises from a different interaction between CDR3 and Spike^{S2P}, which nudges the RBDs into a new resting position (FIG. 30D). While the I27Y substitution optimizes local contacts between CDR1 in its original binding site on the RBD, the P105Y substitution leads to a marked rearrangement of CDR3 in mNb6 (FIG. 30E-F). This conformational change yields a different set of contacts between mNb6 CDR3 and the adjacent RBD. An X-ray crystal structure of mNb6 alone revealed dramatic conformational differences in CDR1 and CDR3 between free and Spike^{S2P}-bound mNb6 (FIG. 30G; FIG. 43). Although differences in loop conformation in the crystal structure may arise from crystal lattice contacts, they are suggestive of conformational heterogeneity for unbound mNb6 and induced-fit rearrangements upon binding to Spike^{S2P}.

[0277] The binding orientation of mNb6 is similar to that of Nb6, suggesting that multivalent design would likewise enhance binding affinity. Unlike Nb6-tri, trivalent mNb6 with a 20 amino acid linker (mNb6-tri) bound to Spike^{S2P} with no observable fast-phase dissociation and no measurable dissociation over ten minutes, yielding an upper bound for the dissociation rate constant kd of 1.0×10-6s-1 (t½>8 days) and a KD of <1 pM (FIG. 30A). mNb6-tri displays further gains in potency in both pseudovirus and live SARS-CoV-2 infection assays with IC50 values of 120 pM (5.0 ng/mL) and 54 pM (2.3 ng/mL), respectively (FIG. 30B, FIG. 41). Given the sub-picomolar affinity observed by SPR, it is likely that these viral neutralization potencies reflect the lower limit of the assays. mNb6-tri is therefore an exceptionally potent SARS-CoV-2 neutralizing molecule.

[0278] Next, viral neutralization by the Class I nanobody mNb6 was tested to see if it was potentially synergistic with the Class II nanobody Nb3-tri. In pseudovirus neutralization assays, an additive effect was observed when combining Nb3-tri with mNb6 (FIG. 39). However, the potency for mNb6 viral neutralization was unchanged with increasing concentrations of Nb3-tri, suggesting minimal synergy between these two nanobodies.

[0279] Next, Nb6 and its derivatives were tested for stability. Circular dichroism revealed melting temperatures of 66.9, 62.0, 67.6, and 61.4° C. for Nb6, Nb6-tri, mNb6 and mNb6-tri, respectively (FIG. 40). Moreover, mNb6 and mNb6-tri were stable to lyophilization and to aerosolization, showing no aggregation by size exclusion chromatography and preserved high affinity binding to Spike^{S2P} (FIG. 31A-B and FIG. 40). Finally, mNb6-tri retains potent inhibition of pseudovirus and live SARS-CoV-2 infection after aerosolization, lyophilization, or heat treatment for 1 hour at 50° C. (FIG. 31C and FIG. 40).

[0280] Strategies to prevent SARS-CoV-2 entry into the host cell aim to block the ACE2-RBD interaction (20, 23-30). Although high-affinity monoclonal antibodies are leading the way as potential therapeutics, they are expensive to produce by mammalian cell expression and need to be intravenously administered by healthcare professionals. Large doses are needed for prophylactic use, as only a small fraction of systemic antibodies cross the epithelial cell layers lining the airways (32). By contrast, nanobodies can be inexpensively produced in bacteria or yeast. The inherent stability of nanobodies enables aerosolized delivery directly to the nasal and lung epithelia (33). Indeed, aerosol delivery of a trimeric nanobody targeting respiratory syncytial virus (ALX-0171) was recently demonstrated to be effective in substantially decreasing measurable viral load in hospitalized infants (34). Finally, potential immunogenicity of camelid-derived nanobodies can be mitigated by established humanization strategies (35).

[0281] Nanobody multimerization has been shown to improve target affinity by avidity (33, 36). In the case of Nb6 and mNb6, structure-guided design of a multimeric construct that simultaneously engages all three RBDs yielded profound gains in potency. Furthermore, because RBDs must be in the up-state to engage with ACE2, conformational control of RBD accessibility serves as an added neutralization mechanism (30). Indeed, when mNb6-tri engages with Spike, it prevents ACE2 binding by both directly occluding the binding site and by locking the RBDs into an inactive conformation. Discovery of Class II neutralizing nanobodies demonstrates potentially novel mechanisms of disrupting Spike function. Pairing of Class I and Class II nanobodies in a prophylactic or therapeutic cocktail could provide both potent neutralization and prevention of escape variants. The combined stability, potency, and diverse epitope engagement of our anti-Spike nanobodies therefore provide a unique potential prophylactic and therapeutic strategy to limit the continued toll of the COVID-19 pandemic.

[0282] Materials and Methods:

[0283] 1. Expression and Purification of SARS-CoV-2 Spike, RBD, and ACE2

[0284] A previously described construct was used to express and purify the pre-fusion SARS-CoV-2 Spike ectodomain (Spike^{S2P})(15). ExpiCHO or Expi293T cells (ThermoFisher) were transfected with the Spike^{S2P} construct per the manufacturer's instructions for the MaxTiter protocol and harvested between 3-9 days after transfection. Clarified cell culture supernatant was loaded onto Ni-Excel beads (Cytiva) followed by extensive washes in 20 mM HEPES pH 8.0, 200 mM sodium chloride, and 10 mM imidazole and elution in the same buffer supplemented with 500 mM imidazole. Spike^{S2P} was concentrated using a 100 kDa MWCO spin concentrator (Millipore) and further purified by size exclusion chromatography over a Superose 6 Increase 10/300 column (GE Healthcare) in 20 mM HEPES pH 8.0 and 200 mM sodium chloride. All purification steps were performed at room temperature. The resulting fractions for trimeric Spike^{S2P} were pooled and either used directly for cryo-EM studies or concentrated and flash frozen in liquid nitrogen with 15% glycerol for other biochemical studies.

[0285] We used a previously described construct to express and purify the SARS-CoV-2 Receptor binding domain (RBD)(37). Expi293T cells (ThermoFisher) were transfected with the RBD construct per the manufacturer's instructions and harvested between 3-6 days after transfection. Clarified cell culture supernatant was loaded onto Ni-Excel beads (Cytiva) or a His-Trap Excel column (GE Healthcare) followed by washes in 20 mM HEPES pH 8.0, 200 mM sodium chloride, and 10 mM imidazole and elution using the same buffer supplemented with 500 mM imidazole. RBD was concentrated using a 30 kDa MWCO spin concentrator (Millipore) and further purified by size exclusion chromatography over a Superdex 200 Increase 10/300 GL column (GE Healthcare) in 20 mM HEPES pH 8.0 and 200 mM sodium chloride. The resulting fractions were pooled, concentrated, and flash frozen in liquid nitrogen with 10% glycerol.

[0286] For biochemical and yeast display experiments, Spike^{S2P} and RBD were labeled with freshly prepared stocks of Alexa 647-NHS, Alexa 488-NHS, or Biotin-NHS (ThermoFisher) with a 5-fold stoichiometry for 1 hour at room temperature followed by quenching of NHS with 10 mM Tris pH 8.0 for 60 minutes. Labeled proteins were further purified by size exclusion chromatography, concentrated using a spin concentrator (Millipore), and flash frozen in liquid nitrogen with 10-15% glycerol.

[0287] We used an ACE2-ECD (18-614) Fc fusion expression plasmid to express and purify Fc tagged ACE2-ECD(38). Expi293T cells (ThermoFisher) were transfected with the ACE2-Fc construct per the manufacturer's instructions and harvested between 5-7 days after transfection. Clarified cell culture supernatant was loaded onto a MabSelect Pure 1 mL Column (GE Healthcare). Column was washed with Buffer A (20 mM HEPES pH 7.5, 150 mM NaCl) and protein was eluted with Buffer B (100 mM Sodium Citrate pH 3.0, 150 mM NaCl) into a deep well block containing 1 M HEPES pH 7.5 to neutralize the acidic elution. ACE2-Fc was concentrated using a 30 kDa MWCO spin concentrator (Millipore) and further purified by size exclusion chromatography over a Superdex 200 Increase 10/300 GL column (GE Healthcare) in SEC Buffer (20 mM HEPES pH 7.5, 150 mM NaCl, 5% v/v Glycerol). The resulting fractions were pooled, concentrated, and flash frozen in liquid nitrogen. To obtain monomeric ACE2, 1:50 (w/w) His-tagged TEV protease was added to ACE2-Fc and incubated at 4° C. overnight. This mixture was then purified by size exclusion chromatography in SEC Buffer. Monomeric ACE2 fractions were pooled and washed with His-resin (1 mL of 50% slurry) to remove excess TEV. The resulting supernatant was pooled, concentrated, and flash frozen in liquid nitrogen.

[0288] 2. Identification of Anti SARS-CoV2 Spike Nanobodies

[0289] To identify nanobodies against the SARS-CoV-2 Spike ECD, we used a yeast surface displayed library of synthetic nanobody sequences that recapitulate amino acid position specific-variation in natural llama immunological repertoires. This library encodes a diversity of >2×10⁹ variants, and uses a synthetic stalk sequence for nanobody display, as described previously in a modified vector encoding nourseothricin (NTC) resistance(17). For the first round of selection, 2×10¹⁰ yeast induced in YPG (Yeast Extract-Peptone-Galactose) supplemented with NTC were washed repeatedly in selection buffer (20 mM HEPES, pH 7.5, 150 mM sodium chloride, 0.1% (w/v) low biotin bovine serum albumin, BSA) and finally resuspended in 10 mL of selection buffer containing 200 nM biotinylated-Spike^{S2P}. Yeast were incubated for 30 minutes at 25° C., then washed repeatedly in cold selection buffer, and finally resuspended in 10 mL of cold selection buffer containing 200 μL of Miltenyi anti-Streptavidin microbeads. After 30 minutes of incubation at 4° C., yeast were again washed with cold selection buffer. Spike^{S2P} binding yeast were captured on a Miltenyi MACS LS column and recovered in YPD (Yeast Extract-Peptone-Dextrose) medium supplemented with NTC.

[0290] For round 2, 4×10⁸ induced yeast from Round 1 were incubated with 100 nM Spike^{S2P} labeled with Alexa647 in 1 mL of selection buffer for 1 hr at 25° C. After extensive washes with cold selection buffer, Spike^{S2P} binding yeast were isolated by fluorescence activated cell sorting (FACS) on a Sony SH800 instrument. A similar approach was used for round 3, with substitution of 10 nM Spike^{S2P} labeled with Alexa647. Post round 3 yeast were plated on YPD+NTC solid media and 768 individual colonies were induced with YPG+NTC media in 2 mL deep well plates. Each individual clone was tested for binding to 4 nM Spike^{S2P}-Alexa488 by flow cytometry on a Beckman Coulter Cytoflex. To identify nanobodies that disrupt Spike-ACE2 interactions, Spike^{S2P} binding was repeated in the presence of 0.5-1 μM ACE2-Fc. Out of 768 clones, we identified 21 that strongly bind Spike^{S2P} and are competitive with ACE2 (FIG. 44).

[0291] 3. Expression and Purification of Nanobodies

[0292] Nanobody sequences were cloned into the pET26-b(+) expression vector using In-Fusion HD cloning (Takara Bio), transformed into BL21(DE3) E. coli (New England BioLabs), grown in Terrific Broth at 37° C. until OD 0.7-0.8, followed by gene induction using 1 mM IPTG for 18-22 hours at 25° C. E. coli were harvested and resuspended in SET Buffer (200 mM Tris, pH 8.0, 500 mM sucrose, 0.5 mM EDTA, 1× cOmplete protease inhibitor (Roche)) for 30 minutes at 25° C. before a 45 minute osmotic shock with a two-fold volume addition of water. NaCl, MgCl2, and imidazole were added to the lysate to 150 mM, 2 mM, and 40 mM respectively before centrifugation at 17-20,000×g for 15 minutes to separate cell debris from the periplasmic fraction. For every liter of bacterial culture, the periplasmic fraction was then incubated with 4 mL of 50% HisPur Ni-NTA resin (Thermo Scientific) which had been equilibrated in Nickel Wash Buffer (20 mM HEPES, pH 7.5, 150 mM NaCl, 40 mM imidazole). This mixture was incubated for 1 hr with rotation at RT before centrifugation at 50×g to collect the resin. The resin was then washed with 5 volumes of Nickel Wash buffer 3 times, each time using centrifugation to remove excess wash buffer. Bound proteins were then eluted using three washes with Elution Buffer (20 mM HEPES, pH 7.5, 150 mM NaCl, 500 mM imidazole). The eluted protein was concentrated using a 3.5 kDa MWCO centrifugal filter unit (Amicon) before injection onto a Superdex 200 Increase 10/300 GL column equilibrated with 20 mM HEPES, pH 7.5, 150 mM NaCl. Nanobody constructs were concentrated again using a 3.5 k MWCO centrifugal filter unit, and flash frozen in liquid nitrogen.

[0293] 4. Affinity Determination by Surface Plasmon Resonance

[0294] Nanobody (Nb) affinity determination experiments were performed on Biacore T200 and 8K instruments (Cytiva Life Sciences) by capturing the Streptagll-tagged Spike^{S2P} at 10 μg/mL on a StreptactinXT-immobilized (Iba Life Sciences) CM5 Series S sensor chip (Cytiva Life Sciences) to achieve maximum response (Rmax) of approximately 30 response units (RUs) upon nanobody binding. 2-fold serial dilutions of purified nanobody from 1 μM to 31.25 nM (for monovalent constructs) or from 50 nM to 1.56 nM (for affinity matured and multimeric constructs) were flowed over the captured Spike^{S2P} surface at 30 μL/minute for 60 seconds followed by 600 seconds of dissociation flow. Following each cycle, the chip surface was regenerated with 3 M guanidine hydrochloride.

[0295] Separately, biotinylated SARS-CoV-2 RBD at 8 μg/mL was loaded onto a preconditioned Series S Sensor Chip CAP chip (Cytiva Life Sciences) to achieve an Rmax of approximately 60 RUs upon nanobody binding. 2-fold serial dilutions in the same running buffer and sample series (parent or affinity matured clone) as the Spike^{S2P} runs were flowed over the RBD surface at 30 μL/minute for 60 seconds followed by 600 seconds of dissociation flow. Chip surface regeneration was performed with a guanidine hydrochloride/sodium hydroxide solution.

[0296] The resulting sensorgrams for all monovalent clones were fit to a 1:1 Langmuir binding model using the Biacore Insight Evaluation Software (Cytiva Life Sciences) or the association/dissociation model in GraphPad Prism 8.0. For determination of kinetic parameters for Nb6-bi and Nb6-tri binding, the dissociation phase was fit to a biexponential decay constrained to two dissociation rate constants shared between each concentration. The association phase was fit separately using an association kinetics model simultaneously fitting the association rate constant for each concentration.

[0297] For nanobody competition experiments, Spike^{S2P} was loaded onto a StreptactinXT-immobilized CM5 sensor chip as previously described. As in the kinetics experiments, the primary nanobody was flowed over the captured Spike^{S2P} surface for 60 seconds at 30 μL/minute to achieve saturation. Immediately following this, a second injection of a mixture of primary and variable nanobody at the same concentration as in the primary injection was performed.

[0298] 5. ACE2 Cellular Surface Binding Competition Assays

[0299] A dilution series of nanobody was generated in PBE (PBS+0.5% (w/v) BSA+2 mM EDTA and mixed with Spike^{S2P}-Alexa647 or RBD-Alexa647. ACE2 expressing HEK293T cells were dissociated with TrypLE Express (ThermoFisher) and resuspended in PBE(22). The cells were mixed with the Spike^{S2P}-nanobody solution and incubated for 45 minutes, washed in PBE, and then resuspended in PBE. Cell surface Alexa647 fluorescence intensity was assessed on an Attune Flow Cytometer (ThermoFisher).

[0300] 6. Affinity Maturation of Nb6

[0301] A site saturation mutagenesis library of Nb6 was generated by assembly PCR of overlapping oligonucleotides encoding the Nb6 sequence. Individual oligos for each position in CDR1, CDR2, and CDR3 were designed with the degenerate “NNK” codon. The assembled gene product was amplified with oligonucleotides with overlapping ends to enable homologous recombination with the yeast surface display vector as previously described and purified with standard silica-based chromatography(17). The resulting insert DNA was transformed into Saccharomyces cerevisiae strain BJ5465 (ATCC 208289) along with the yeast display vector pYDS2.0 to generate a library of 2×10⁸ transformants. After induction in YPD+NTC medium at 20° C. for 2 days, 2×10⁹ yeast were washed in selection buffer (20 mM HEPES, pH 8.0, 150 mM sodium chloride, 0.1% (w/v) low biotin BSA) and incubated with 1 nM biotin-Spike^{S2P} for 1 hour at 25° C. Yeast were subsequently washed in selection buffer, resuspended in 1 mL selection buffer, and incubated with 10 μL, streptavidin microbeads (Miltenyi) for 15 min. at 4° C. Yeast were washed again with cold selection buffer and Spike^{S2P}-binding yeast were isolated by magnetic separation using an LS column (Miltenyi). Recovered yeast were grown in YPD+NTC at 37° C. and induced in YPG+NTC at 20° C. A second round of selection was performed as above, substituting 100 pM RBD-Alexa647 as the antigen. Yeast displaying high affinity clones were selected by magnetic separation using Anti-Cy5 microbeads (Miltenyi) and an LS column. Analysis of the library after the second round of selection revealed a population of clones with clear binding of 10 pM RBD-Alexa647. Therefore, 96 individual clones were screened for binding to 10 pM RBD-Alexa647 by flow cytometry. Sequence analysis of eight clones that showed robust binding to 10 pM RBD-Alexa647 revealed two consensus mutations, I27Y and P105Y, which were used to generate the affinity matured clone mNb6.

[0302] 7. mNb6 Crystallography and Structure Determination

[0303] Purified mNb6 was concentrated to 18.7 mg/mL and filtered using 0.1 μm hydrophilic PVDF filters (Millipore). mNb6 crystal screens were set up in 96 well plates in hanging drop format at 2:1 protein:reservoir in Index and AmSO4 screens (Hampton Research, Aliso Viejo, Calif.). Crystals in over 60 different screening conditions with various morphologies appeared overnight at ambient temperature and were obtained directly from the screens without further optimization. The crystals were cryoprotected by quick dipping in a solution containing 80% reservoir and 20% PEG400 or 20% Glycerol, then mounted in CrystalCap HT Cryoloops (Hampton Research, Aliso Viejo, Calif.) and flash cooled in a cryogenic nitrogen stream (100 K). All data were collected at the Advanced Light Source (Berkeley, Calif.) beam line 8.3.1. A single crystal of mNb6 that grew in 0.1 M Tris·HCl pH 8.5, 1.0 M Ammonium sulfate diffracted to 2.05 Å. Integration, and scaling were performed with Xia2, using XDS for indexing and integration and XSCALE for scaling and merging(39). The structure was solved molecular replacement using PHASER using the structure of nanobody, Nb.b201 (PDB 5VNV) as search model(17, 40). Model building was performed with COOT and refined with PHENIX and BUSTER(41-43).

[0304] 6. Structures of Spike-Nanobody Complexes by cryo-EM

[0305] A) Sample Preparation and Microscopy

[0306] To prepare Spike^{S2P}-nanobody complexes, each nanobody was incubated on ice at a 3-fold molar excess to Spike^{S2P} at 2.5 μM for 10 minutes. 3 μL of Spike^{S2P}-nanobody complex was added to a 300 mesh 1.2/1.3R Au Quantifoil grid previously glow discharged at 15 mA for 30 seconds with a Pelco easiGlow Glow discharge cleaning system. Using Whatman No.1 qualitative filter paper, Blotting was performed with a blot force of 0 for 4 seconds at 4° C. and 100% humidity in a FEI Vitrobot Mark IV (ThermoFisher) prior to plunge freezing into liquid ethane.

[0307] For each complex, 120-frame super-resolution movies were collected with a 3×3 image shift collection strategy at a nominal magnification of 105,000× (physical pixel size: 0.834 Å/pix) on a Titan Krios (ThermoFisher) equipped with a K3 camera and a Bioquantum energy filter (Gatan) set to a slit width of 20 eV. Collection dose rate was 8 eipixel/second for a total dose of 66 e⁻/Å². Each collection was performed with semi-automated scripts in SerialEM(44).

[0308] B) Image Processing

[0309] For all datasets, dose fractionated super-resolution movies were motion corrected with MotionCor2(45). Contrast transfer function determination was performed with cryoSPARC patch CTF(46). Particles were picked with a 20 A low-pass filtered apo Spike 2D templates generated from a prior data collection.

[0310] Nb6-Spike^{S2P} and mNb6-Spike^{S2P} particles were extracted with a 384 pixel box, binned to 96 pixels and subject to single rounds of 2D and 3D classification prior to unbinning for homogenous refinement in cryoSPARC. Using pyEM modules, refined particles were then imported into Relion3.1 for 3D classification without alignment using the input refinement map low pass filtered to 40 Å(47, 48). Particles in classes representing the closed conformation of Spike were imported into cisTEM and subject to autorefinement followed by local refinement within a RBD::nanobody masked region(49). Following local refinement, a new refinement package symmetrized to the C3 axis was created for a final round of local refinement without masking. Final particle counts for each map are as follows: Nb6-Open: 40,125, Nb6-Closed: 58,493, mNb6: 53,690.

[0311] Nb11-Spike^{S2P} particles were extracted with a 512 pixel box, binned to 128 pixels for multiple rounds of 3D classification as described in FIG. 35. Following homogenous refinement, particles were exported to Relion3.1. Particle density roughly corresponding to RBD-nanobody complexes was retained post-particle subtraction. 3D classification without alignment was performed on the particle subtracted stacks. Particles in classes with robust RBD-nanobody density were selected, unsubtracted and refined in Relion followed by post-processing. 21,570 particles contributed to the final maps. Final particle counts for each map are as follows: Nb11-Open: 21,570, Nb11-Closed: 27,611, For all maps, final local resolution estimation and GSFSC determination was carried out in cryoSPARC. Viewing angle distribution plots were generated with pyEM modules and visualized with ChimeraX(50).

[0312] C) Structure Modeling

[0313] Models of Nb6-Spike^{S2P} and mNb6-Spike^{S2P} were built using a previously determined structure of closed Spike^{S2P} (PDB: 6VXX)(14). A composite model incorporating resolved regions of the RBD was made using a previously determined X-ray crystal structure of the SARS-CoV-2 RBD (PDB: 6M0J)(51). For Nb6, the beta2-adrenergic receptor nanobody Nb80 (PDB: 3P0G) was used as a template to first fit the nanobody into the cryo-EM density map for the Nb6-Spike^{S2P} complex(52). Complementarity determining loops were then truncated and rebuilt using RosettaES(53). The higher resolution structure of mNb6 enabled manual building of nanobody CDR loops de novo, and therefore the Rosetta-based approach was not used for modeling. The final structures were inspected and manually adjusted in COOT and ISOLDE, followed by real space refinement in PHENIX(41, 43, 54) and further refined and relaxed using Rosetta(55). Glycans were refined utilizing the glycan specific Rosetta protocol that incorporates prior knowledge on carbohydrate conformations to ensure lowest energy glycan geometries(56). Final glycan placement was inspected manually and using the Privateer software package distributed under CCP4 (57, 58). Final protein models were analyzed with Molprobity(59), EMRinger(60), PHENIX, with statistics reported in FIG. 42.

[0314] For models of Nb11-Spike^{S2P} complexes presented here, the closest nanobody by sequence in the PDB (beta2-adrenergic receptor Nb60, PDB ID: 5JQH) was fit by rigid-body refinement in COOT into the cryo-EM density map using only the framework regions(61). While the lower resolution of these maps precluded confident assignment of loop conformations, the overall orientation of Nb11 relative to Spike^{S2P} was well constrained, enabling accurate modeling of distances between the N- and C-termini of two Nb11 molecules bound to Spike^{S2P}.

[0315] Radiolytic hydroxyl radical footprinting and mass-spectrometry of apo and Nb3-bound Spike^{S2P}

[0316] Spike^{S2P} and Nb3 samples were buffer exchanged into 10 mM phosphate buffer (pH 7.4) by extensive dialysis at 25° C. A 1.5-fold molar excess of Nb3 was added to 5 μM Spike^{S2P} and the complex was incubated for >24 hr at 25° C. For radiolytic footprinting, protein concentrations and beam parameters were optimized using an Alexa-488 fluorophore assay(l8). Apo Spike^{S2P} and Spike^{S2P}-Nb3 complex at concentrations of 1-3 μM were exposed to a synchrotron X-ray white beam at 6 timepoints between 0-50 ms at beamline 3.2.1 at the Advanced Light Source in Berkeley, Calif. and were quenched with 10 mM methionine amide immediately post-exposure. Glycans were removed by treatment with 5% SDS, 5 mM DTT at 95° C. for five minutes and subsequent PNGase (Promega) digestion at 37° C. for 2 hours. Samples were buffer exchanged into ammonium bicarbonate (ABC) buffer (pH 8.0) using ZebaSpin columns (Thermo Fisher). Alkylation of cysteines was achieved by treatment with 8 M urea and 5 mM DTT at 37° C. for 30 minutes followed by an incubation with 15 mM iodoacetamide at 25° C. in the dark for 30 minutes. All samples were further buffer exchanged to ABC pH 8.0 using ZebaSpin columns and digested with either Trypsin/Lys-C or Glu-C (Promega) at an enzyme:protein ratio of 1:20 (w/w) at 37° C. for 8 hours.

[0317] Samples were lyophilized and resuspended in 1% formic acid at 200 fmol/μL concentration. For each MS analysis, 1 μL of sample was injected onto a 5 mm Thermo Trap C18 cartridge, and then separated over a 15 cm column packed with 1.9 μm Reprosil C18 particles (Dr. Maisch HPLC GmbH) by a nanoElute HPLC (Bruker). Separation was performed at 50° C. and a flow rate of 400 μL/min by the following gradient in 0.1% formic acid: 2% to 17% acetonitrile from 0 to 20 min, followed by 17% to 28% acetonitrile from 20 to 40 min. The eluent was electrospray ionized into a Bruker timsTOF Pro mass spectrometer and data was collected using data-dependent PASEF acquisition. Database searching and extraction of MS1 peptide abundances was performed using the FragPipe platform with either trypsin or GluC enzyme specificity, and all peptide and protein identifications were filtered to a 1% false-discovery rate(62). Searches were performed against a concatenated protein database of the Spike protein, common contaminant proteins, and the Saccharomyces cerevisiae proteome (downloaded Jul. 23, 2020). Note, the Saccharomyces cerevisiae proteome was included to generate a sufficient population of true negative identifications for robust false discovery rate estimation of peptide and protein identifications. Lastly, the area under the curve MS1 intensities reported from FragPipe were summarized for each peptide species using MSstats(63).

[0318] The peak areas of extracted ion chromatograms and associated side-chain modifications were used to quantify modification at each timepoint. Increasing beamline exposure time decreases the fraction of unmodified peptide and can be represented as a site-specific dose-response plot. The rate of hydroxyl radical reactivity (k_{fp}) is dependent on both the intrinsic reactivity of each residue and its solvent accessibility and was calculated by fitting the dose-response to a pseudo-first order reaction scheme in Graphpad Prism Version 8. The ratio of k_{fp} between apo Spike^{S2P} and the Spike-Nb3 complex at specific residues gave information on solvent accessibility changes between the two samples. These changes were mapped onto the SARS-CoV-2 Spike (PDB 6XR8)(11). In some cases, heavily modified residues show a flattening of dose-response at long exposures which we interpret as radical induced damage. These over-exposed timepoints were excluded from the calculation of kfₚ.

[0319] D) Pseudovirus Assays for Nanobody Neutralization

[0320] ZsGreen SARS-CoV-2-pseudotyped lentivirus was generated according to a published protocol(22). The day before transduction, 50,000 ACE2 expressing HEK293T cells were plated in each well of a 24-well plate. 10-fold serial dilutions of nanobody were generated in complete medium (DMEM+10% FBS+PSG) and pseudotyped virus was added to a final volume of 200 μL. Media was replaced with nanobody/pseudotyped virus mixture for four hours, then removed. Cells were washed with complete medium and then incubated in complete medium at 37° C. Three days post-transduction, cells were trypsinized and the proportion of ZsGreen+ cells was measured on an Attune flow cytometer (ThermoFisher).

[0321] E) Authentic SARS-CoV-2 Neutralization Assay

[0322] SARS-CoV-2, isolate France/IDF0372/2020, was supplied by the National Reference Centre for Respiratory Viruses hosted by Institut Pasteur (Paris, France) and headed by Pr. Sylvie van der Werf. Viral stocks were prepared by propagation in Vero E6 cells in Dulbecco's modified Eagle's medium (DMEM) supplemented with 2% (v/v) fetal bovine serum (FBS, Invitrogen). Viral titers were determined by plaque assay. All plaque assays involving live SARS-CoV-2 were performed at Institut Pasteur Paris (IPP) in compliance with IPP's guidelines following Biosafety Level 3 (BSL-3) containment procedures in approved laboratories. All experiments were performed in at least three biologically independent samples.

[0323] Neutralization of infectious SARS-CoV-2 was performed using a plaque reduction neutralization test in Vero E6 cells (CRL-1586, ATCC). Briefly, nanobodies (or ACE2-Fc) were eight-fold serially diluted in DMEM containing 2% (v/v) FBS and mixed with 50 plaque forming units (PFU) of SARS-CoV-2 for one hour at 37° C., 5% CO₂. The mixture was then used to inoculate Vero E6 cells seeded in 12-well plates, for one hour at 37° C., 5% CO2. Following this virus adsorption time, a solid agarose overlay (DMEM, 10% (v/v) FBS and 0.8% agarose) was added. The cells were incubated for a further 3 days prior to fixation using 4% formalin and plaques visualized by the addition of crystal violet. The number of plaques in quadruplicate wells for each dilution was used to determine the half maximal inhibitory concentrations (IC₅₀) using 3-parameter logistic regression (GraphPad Prism version 8).

[0324] F) Nanobody Stability Studies

[0325] Nanobody thermostability by circular dichroism was assessed using a Jasco J710 CD spectrometer equipped with a Peltier temperature control. Individual nanobody constructs were diluted to 5 μM in phosphate buffered saline. Mollar ellipticity was measured at 204 nm (2 nm bandwidth) between 25° C. and 80° C. with a 1° C./min heating rate. The resulting molar ellipticity values were normalized and plotted in GraphPad Prism 8.0 after applying a nearest neighbor smoothing function.

[0326] For nanobody competition experiments on ACE2 expressing HEK293T cells, nanobodies were incubated at either 25° C. or 50° C. for one hour. Alternatively, each nanobody was aerosolized with a portable mesh nebulizer producing 2-5 μm particles at a final concentration of 0.5 mg/mL. The resulting aerosol was collected by condensation into a 50 mL tube cooled on ice. Samples were then treated as indicated above to determine IC50 values for binding to Spike^{S2P}-Alexa647 or used for pseudovirus neutralization studies as described above.

[0327] Further experiments assessing mNb6 and mNb6-tri stability to aerosolization and lyophilization used a starting concentration of 0.5 mg/mL of each construct. Aerosolization was performed as described above. For lyophilization, nanobodies were first flash frozen in liquid nitrogen and the solution was dried to completion under vacuum. The resulting dried material was resuspended in 20 mM HEPES pH 7.5, 150 mM NaCl. Size exclusion chromatography of the unstressed, post-aerosolization, and post-lyophilization samples were performed an a Superdex 75 Increase 10/300 column in 20 mM HEPES pH 7.5, 150 mM NaCl. SPR experiments to assess binding to Spike^{S2P} were performed as described above. For live SARS-CoV-2 virus experiments, aerosolized, lyophilized, or heat-treated samples were flash frozen in liquid nitrogen prior to shipping.

### 1.5 Example 5

### Evaluation of Nanoparticle A for Treatment of SARS-CoV-2 Infection and Transmission in Golden Syrian Hamsters

[0328] Objective: The objective of this study was to assess the efficacy of Nanoparticle A for treatment of a SARS-CoV-2 infection in wild-type golden Syrian hamsters. In addition, the efficacy of Nanoparticle A at reducing the direct transmission of SARS-CoV-2 from infected animals to naïve littermates was also evaluated. The effect of Nanoparticle A treatment on weight loss, lung virus titers, and lung weights in hamsters exposed to SARS-CoV-2 were the primary endpoints.

[0329] Materials and Methods:

[0330] Animals: Female 5-week-old golden Syrian hamsters were obtained from Charles River Laboratories (Wilmington, Mass.) for this experiment. The hamsters were quarantined for 3 days before use and maintained on Teklad Rodent Diet (Harlan Teklad) and tap water at the Laboratory Animal Research Center of Utah State University.

[0331] Virus: Severe Acute Respiratory Syndrome Coronavirus-2 (SARS-CoV-2) USA_WA1/2020 strain was obtained from the World Reference Center for Emerging Viruses and Arboviruses (WRCEVA). The virus was passaged two times in Vero 76 cells to generate a working stock for infection of hamsters.

[0332] Experiment Design—Transmission and Efficacy Study: A total of 24 5-week-old female golden Syrian hamsters were randomized into 2 groups of 4 hamsters to serve as untreated infected animals and 2 groups of 8 naïve hamsters for cohabitation with and without Nanoparticle A treatment (FIG. 51). For the efficacy study, a total of 37 hamsters were divided into 4 groups of 8 animals per treatment dose with 5 animals used as normal controls for weight gain (FIG. 52). For virus challenge, hamsters in groups 1, 3, and 5 were anesthetized by IP injection of ketamine/xylazine (50 mg/kg/5 mg/kg) prior to challenge by the intranasal route with a dose of 1×104.3 50% cell culture infectious doses (CCID50) in a 100 μl inoculum volume. All intranasal treatments were administered in a 100 μl volume after anesthetizing animals as was done for infections. Animals in groups 1 and 3 were not treated. Animals in group 2 and 4 were not infected but were cohabitated with animals from groups 1 or 3 for 4 hours each day on study days 1, 2, and 3. Animals in group 2 were treated with saline as a placebo. Animals in group 4 were treated once daily with Nanoparticle A 2 hours prior to cohabitation with infected animals. Hamsters were weighed prior to infection and then everyday thereafter to evaluate infection-associated weight loss. All animals were euthanized on study day 4 to evaluate lung virus titers and the transmission of virus from infected animals to naïve animals. Oropharyngeal swabs were collected on all animals.

[0333] Titration of Lung Tissue Samples: Lung tissues homogenates were titrated by endpoint dilution. Serial log 10 dilutions of lung tissue homogenate were plated in quadruplicate wells of 96-well microplates containing confluent monolayers of Vero 76 cells. The plates were incubated in at 37° C. incubator with 5% CO2 for 6 days. The plates were then scored by visual observation under a light microscope for the presence of cytopathic effect (CPE). Virus titer for each sample was calculated by linear regression using the Reed-Muench method (Reed L J and Muench H, A simple method of estimating fifty per cent endpoints. American Journal of Hygiene. 1938).

[0334] Statistics and Figures: Individual hamster body weights were converted to a percent of initial body weight on the day of infection. The percentage of initial body weight curves were compared using a one-way analysis of variance (ANOVA) comparing each treatment group to placebo-treated hamsters. Lung virus titers and lung weights were compared using a one-way ANOVA comparing the treated animals to placebo-treated animals.

[0335] This study evaluated the efficacy of intranasal treatment with Nanoparticle A on the transmission of SARS-CoV-2 in golden Syrian hamsters. Treatment with Nanoparticle A was also evaluated for reduction of lung virus titers and lung weights in hamsters infected with SARS-CoV-2.

[0336] Results: Percent initial body weight of 5-week-old golden Syrian hamsters following challenge with SARS-CoV-2 and treatment with Nanoparticle A prior to cohabitation with infected animals is shown in FIG. 57. Animals with the same shape symbols were cohabitated. Groups represented with the closed circle and closed square were infected on study day 0. Animals represented by the open circle were naïve and placebo-treated prior to cohabitation with animals from group 1 for 4 hrs per day for 3 days. Animals represented by the open square were naïve and Nanoparticle A-treated prior to cohabitation with animals from group 3. The differences in percent initial body weight were not statistically significant when compared by one-way ANOVA.

[0337] FIG. 58 shows lung virus titers of 5-week-old golden Syrian hamsters after challenge with SARS-CoV-2 and treatment with Nanoparticle A prior to cohabitation with infected animals. Animals with the same shape symbols were cohabitated. Groups represented with the closed circle and closed square were infected on study day 0. Animals represented by the open circle were naïve and placebo-treated prior to cohabitation with animals from group 1 for 4 hrs per day for 3 days. Animals represented by the open square were naïve and Nanoparticle A-treated prior to cohabitation with animals from group 3. Treatment with Nanoparticle A significantly reduced lung virus titers in naïve animals cohabitated with SARS-CoV-2-infected animals. This data is summarized in FIG. 53.

[0338] FIG. 59 shows lung weights of 5-week-old golden Syrian hamsters after challenge with SARS-CoV-2 and treatment with Nanoparticle A prior to cohabitation with infected animals. Animals with the same shape symbols were cohabitated. Groups represented with the closed circle and closed square were infected on study day 0. Animals represented by the open circle were naïve and placebo-treated prior to cohabitation with animals from group 1 for 4 hrs per day for 3 days. Animals represented by the open square were naïve and Nanoparticle A-treated prior to cohabitation with animals from group 3. Lung weights were not statistically different between groups when compared by one-way ANOVA.

[0339] Oropharyngeal swab virus titers of 5-week-old golden Syrian hamsters after challenge with SARS-CoV-2 and treatment with Nanoparticle A prior to cohabitation with infected animals are shown in FIG. 60. Animals with the same shape symbols were cohabitated. Groups represented with the closed circle and closed square were infected on study day 0. Animals represented by the open circle were naïve and placebo-treated prior to cohabitation with animals from group 1 for 4 hrs per day for 3 days. Animals represented by the open square were naïve and Nanoparticle A-treated prior to cohabitation with animals from group 3. No significant difference in oropharyngeal swab virus titers were determined by one-way ANOVA. This data is summarized in FIG. 54 and FIG. 61 shows percent initial body weight of 5-week-old golden Syrian hamsters following treatment with Nanoparticle A and infection with SARS-CoV-2. The differences in percent initial body weight were not statistically significant when compared by one-way ANOVA.

[0340] FIG. 62 shows lung virus titers of 5-week-old golden Syrian hamsters after treatment with Nanoparticle A and infection with SARS-CoV-2. Treatment with Nanoparticle A started significantly reduced lung virus titers at doses of 2 and 0.63 mg/kg/d compared to placebo-treated animals. This data is summarized in FIG. 55.

[0341] FIG. 63 shows lung weights of 5-week-old golden Syrian hamsters after challenge with SARS-CoV-2 and treatment with Nanoparticle A prior to cohabitation with infected animals. Lung weights were not statistically different between groups when compared by one-way ANOVA.

[0342] Oropharyngeal swab virus titers of 5-week-old golden Syrian hamsters after treatment with Nanoparticle A and infection with SARS-CoV-2 are shown in FIG. 64. Treatment with Nanoparticle A at a dose of 2 mg/kg/d significantly reduced oropharyngeal swab titers of hamsters infected with SARS-CoV-2. This data is summarized in FIG. 56.

[0343] Conclusion: This study evaluated the efficacy of intranasal Nanoparticle A treatment on the transmission of SARS-CoV-2 infection in golden Syrian hamsters. The impact of treatment with Nanoparticle A on lung virus titers, oropharyngeal swab titers, and lung weights was also evaluated. Treatment with Nanoparticle A at a dose of 2 mg/kg/d significantly reduced transmission of SARS-CoV-2 to naïve animals. The virus was not detected in the lungs of three of the eight naïve animals that were exposed to infected animals. In the remaining five animals, lung virus titers were reduced by at least one log 10 compared to placebo-treated naïve animals. Oropharyngeal swab titers were significantly reduced by treatment with Nanoparticle A although the virus was not consistently detected even in placebo-treated animals. In the efficacy study, lung virus titers were significantly reduced lung virus titers in animals treated with 2 or 0.63 mg/kg/d compared to placebo-treated animals. Oropharyngeal titers were also significantly reduced by a 2 mg/kg/d dose of Nanoparticle A compared to placebo-treated animals. Oropharyngeal swab titers were only detected in one of eight, two of eight, and three of eight animals at doses of 2, 0.63, and 0.2 mg/kg/d respectively. Oropharyngeal swab titers were detected in six of eight placebo-treated animals.

[0344] No adverse reactions to treatment were observed in any of the animals. A lack of weight loss following treatment also indicates that the treatment was well-tolerated in hamsters.

### REFERENCES AND NOTES

[0345] 1. T. G. Ksiazek et al., A novel coronavirus associated with severe acute respiratory syndrome. N Engl J Med 348, 1953-1966 (2003).

[0346] 2. A. M. Zaki, S. van Boheemen, T. M. Bestebroer, A. D. Osterhaus, R. A. Fouchier, Isolation of a novel coronavirus from a man with pneumonia in Saudi Arabia. N Engl J Med 367, 1814-1820 (2012).

[0347] 3. P. Zhou et at, A pneumonia outbreak associated with a new coronavirus of probable bat origin. Nature 579, 270-273 (2020).

[0348] 4. J. F. Chan et al., A familial cluster of pneumonia associated with the 2019 novel coronavirus indicating person-to-person transmission: a study of a family cluster. Lancet 395, 514-523 (2020).

[0349] 5. C. Huang et al., Clinical features of patients infected with 2019 novel coronavirus in Wuhan, China. Lancet 395, 497-506 (2020).

[0350] 6. F. Wu et al., A new coronavirus associated with human respiratory disease in China. Nature 579, 265-269 (2020).

[0351] 7. N. Zhu et al., A Novel Coronavirus from Patients with Pneumonia in China, 2019. N Engl J Med 382, 727-733 (2020).

[0352] 8. Z. Ke et al., Structures and distributions of SARS-CoV-2 spike proteins on intact virions. Nature, (2020).

[0353] 9. B. Turonova et al., In situ structural analysis of SARS-CoV-2 spike reveals flexibility mediated by three hinges. Science 370, 203-208 (2020).

[0354] 10. B. J. Bosch, R. van der Zee, C. A. de Haan, P. J. Rottier, The coronavirus spike protein is a class I virus fusion protein: structural and functional characterization of the fusion core complex. J Virol 77, 8801-8811 (2003).

[0355] 11. Y. Cai et al., Distinct conformational states of SARS-CoV-2 spike protein. Science 369, 1586-1592 (2020).

[0356] 12. Q. Wang et al., Structural and Functional Basis of SARS-CoV-2 Entry by Using Human ACE2. Cell 181, 894-904 e899 (2020).

[0357] 13. R. Yan et al., Structural basis for the recognition of SARS-CoV-2 by full-length human ACE2. Science 367, 1444-1448 (2020).

[0358] 14. A. C. Walls et al., Structure, Function, and Antigenicity of the SARS-CoV-2 Spike Glycoprotein. Cell 181, 281-292 e286 (2020).

[0359] 15. D. Wrapp et al., Cryo-EM structure of the 2019-nCoV spike in the prefusion conformation. Science 367, 1260-+(2020).

[0360] 16. M. Hoffmann et al., SARS-CoV-2 Cell Entry Depends on ACE2 and TMPRSS2 and Is Blocked by a Clinically Proven Protease Inhibitor. Cell 181, 271-280 e278 (2020).

[0361] 17. C. McMahon et al., Yeast surface display platform for rapid discovery of conformationally selective nanobodies. Nat Struct Mol Biol 25, 289-296 (2018).

[0362] 18. S. Gupta, M. Sullivan, J. Toomey, J. Kiselar, M. R. Chance, The Beamline X28C of the Center for Synchrotron Biosciences: a national resource for biomolecular structure and dynamics experiments using synchrotron footprinting. J Synchrotron Radiat 14, 233-243 (2007).

[0363] 19. Y. Zhang, A. T. Wecksler, P. Molina, G. Deperalta, M. L. Gross, Mapping the Binding Interface of VEGF and a Monoclonal Antibody Fab-1 Fragment with Fast Photochemical Oxidation of Proteins (FPOP) and Mass Spectrometry. J Am Soc Mass Spectrom 28, 850-858 (2017).

[0364] 20. X. Chi et al., A neutralizing human antibody binds to the N-terminal domain of the Spike protein of SARS-CoV-2. Science 369, 650-655 (2020).

[0365] 21. H. Zhou et al., Structural definition of a neutralization epitope on the N-terminal domain of MERS-CoV spike glycoprotein. Nat Commun 10, 3068 (2019).

[0366] 22. K. H. D. Crawford et al., Protocol and Reagents for Pseudotyping Lentiviral Particles with SARS-CoV-2 Spike Protein for Neutralization Assays. Viruses 12, (2020).

[0367] 23. A. Baum et al., Antibody cocktail to SARS-CoV-2 spike protein prevents rapid mutational escape seen with individual antibodies. Science 369, 1014-1018 (2020).

[0368] 24. Y. L. Cao et al., Potent Neutralizing Antibodies against SARS-CoV-2 Identified by High-Throughput Single-Cell Sequencing of Convalescent Patients' B Cells. Cell 182, 73-+(2020).

[0369] 25. B. Ju et al., Human neutralizing antibodies elicited by SARS-CoV-2 infection. Nature 584, 115-119 (2020).

[0370] 26. L. Liu et al., Potent neutralizing antibodies against multiple epitopes on SARS-CoV-2 spike. Nature 584, 450-456 (2020).

[0371] 27. D. Pinto et al., Cross-neutralization of SARS-CoV-2 by a human monoclonal SARS-CoV antibody. Nature 583, 290-295 (2020).

[0372] 28. T. F. Rogers et al., Isolation of potent SARS-CoV-2 neutralizing antibodies and protection from disease in a small animal model. Science 369, 956-963 (2020).

[0373] 29. S. J. Zost et al., Potently neutralizing and protective human antibodies against SARS-CoV-2. Nature 584, 443-449 (2020).

[0374] 30. M. A. Tortorici et al., Ultrapotent human antibodies protect against SARS-CoV-2 challenge via multiple mechanisms. Science, (2020).

[0375] 31. H. Ledford, Antibody therapies could be a bridge to a coronavirus vaccine—but will the world benefit? Nature 584, 333-334 (2020).

[0376] 32. V. H. Leyva-Grado, G. S. Tan, P. E. Leon, M. Yondola, P. Palese, Direct Administration in the Respiratory Tract Improves Efficacy of Broadly Neutralizing Anti-Influenza Virus Monoclonal Antibodies. Antimicrobial Agents and Chemotherapy 59, 4162-4172 (2015).

[0377] 33. L. Detalle et al., Generation and Characterization of ALX-0171, a Potent Novel Therapeutic Nanobody for the Treatment of Respiratory Syncytial Virus Infection. Antimicrob Agents Chemother 60, 6-13 (2016).

[0378] 34. S. Cunningham et al., Nebulised ALX-0171 for respiratory syncytial virus lower respiratory tract infection in hospitalised children: a double-blind, randomised, placebo-controlled, phase 2b trial. Lancet Respir Med, (2020).

[0379] 35. C. Vincke et al., General strategy to humanize a camelid single-domain antibody and identification of a universal humanized nanobody scaffold. J Biol Chem 284, 3273-3284 (2009).

[0380] 36. D. Wrapp et al., Structural Basis for Potent Neutralization of Betacoronaviruses by Single-Domain Camelid Antibodies. Cell 181, 1004-1015 e1015 (2020).

[0381] 37. D. Stadlbauer et at, SARS-CoV-2 Seroconversion in Humans: A Detailed Protocol for a Serological Assay, Antigen Production, and Test Setup. Curr Protoc Microbiol 57, e100 (2020).

[0382] 38. I. Lui et al., Trimeric SARS-CoV-2 Spike interacts with dimeric ACE2 with limited intra-Spike avidity. bioRxiv, 2020.2005.2021.109157 (2020).

[0383] 39. W. Kabsch, Automatic Processing of Rotation Diffraction Data from Crystals of Initially Unknown Symmetry and Cell Constants. J Appl Crystallogr 26, 795-800 (1993).

[0384] 40. A. J. McCoy et at, Phaser crystallographic software. J Appl Crystallogr 40, 658-674 (2007).

[0385] 41. P. D. Adams et at, PHENIX: a comprehensive Python-based system for macromolecular structure solution. Acta Crystallogr D Biol Crystallogr 66, 213-221 (2010).

[0386] 42. B. E. Bricogne G., Brandl M., Flensburg C., Keller P., Paciorek W., S. A. Roversi P, Smart O. S., Vonrhein C., Womack T. O., BUSTER version 1.10.0. Cambridge, United Kingdom: Global Phasing Ltd., (2017).

[0387] 43. P. Emsley, K. Cowtan, Coot: model-building tools for molecular graphics. Acta Crystallogr D Biol Crystallogr 60, 2126-2132 (2004).

[0388] 44. D. N. Mastronarde, Automated electron microscope tomography using robust prediction of specimen movements. J Struct Biol 152, 36-51 (2005).

[0389] 45. S. Q. Zheng et al., MotionCor2: anisotropic correction of beam-induced motion for improved cryo-electron microscopy. Nat Methods 14, 331-332 (2017).

[0390] 46. A. Punjani, J. L. Rubinstein, D. J. Fleet, M. A. Brubaker, cryoSPARC: algorithms for rapid unsupervised cryo-EM structure determination. Nat Methods 14, 290-296 (2017).

[0391] 47. J. Zivanov et at, New tools for automated high-resolution cryo-EM structure determination in RELION-3. Elife 7, (2018).

[0392] 48. D. Asarnow, E. Palovcak, Y. Cheng, UCSF pyem v0.5. (2019).

[0393] 49. T. Grant, A. Rohou, N. Grigorieff, cisTEM, user-friendly software for single-particle image processing. Elife 7, (2018).

[0394] 50. T. D. Goddard et al., UCSF ChimeraX: Meeting modern challenges in visualization and analysis. Protein Sci 27, 14-25 (2018).

[0395] 51. J. Lan et al., Structure of the SARS-CoV-2 spike receptor-binding domain bound to the ACE2 receptor. Nature 581, 215-220 (2020).

[0396] 52. S. G. Rasmussen et al., Structure of a nanobody-stabilized active state of the beta(2) adrenoceptor. Nature 469, 175-180 (2011).

[0397] 53. B. Frenz, A. C. Walls, E. H. Egelman, D. Veesler, F. DiMaio, RosettaES: a sampling strategy enabling automated interpretation of difficult cryo-EM maps. Nat Methods 14, 797-800 (2017).

[0398] 54. T. I. Croll, ISOLDE: a physically realistic environment for model building into low-resolution electron-density maps. Acta Crystallogr D Struct Biol 74, 519-530 (2018).

[0399] 55. R. Y. Wang et al., Automated structure refinement of macromolecular assemblies from cryo-EM maps using Rosetta. Elife 5, (2016).

[0400] 56. B. Frenz et al., Automatically Fixing Errors in Glycoprotein Structures with Rosetta. Structure 27, 134-139 e133 (2019).

[0401] 57. J. Agirre et al., Privateer: software for the conformational validation of carbohydrate structures. Nat Struct Mol Biol 22, 833-834 (2015).

[0402] 58. M. D. Winn et al., Overview of the CCP4 suite and current developments. Acta Crystallogr D Biol Crystallogr 67, 235-242 (2011).

[0403] 59. V. B. Chen et al., MolProbity: all-atom structure validation for macromolecular crystallography. Acta Crystallogr D Biol Crystallogr 66, 12-21 (2010).

[0404] 60. B. A. Barad et al., EMRinger: side chain-directed model and map validation for 3D cryo-electron microscopy. Nat Methods 12, 943-946 (2015).

[0405] 61. D. P. Staus et al., Allosteric nanobodies reveal the dynamic range and diverse mechanisms of G-protein-coupled receptor activation. Nature 535, 448-452 (2016).

[0406] 62. F. Yu et al., Fast Quantitative Analysis of timsTOF PASEF Data with MSFragger and IonQuant. Mol Cell Proteomics 19, 1575-1585 (2020).

[0407] 63. M. Choi et al., MSstats: an R package for statistical analysis of quantitative mass spectrometry-based proteomic experiments. Bioinformatics 30, 2524-2526 (2014).

[0408] All publications, patent applications, and accession numbers mentioned in this specification are herein incorporated by reference to the same extent as if each individual publication or patent application was specifically and individually indicated to be incorporated by reference for the material for which it is cited.

The application's sequence listing, which the Patent Office published only in electronic form, follows.

SEQUENCE LISTING (630 sequences)

SEQ ID NO: 1 - protein, 25 aa, Artificial Sequence
  Synthetic CDR set
QVQLVESGGGLVQAGGSLRLSCAAS

SEQ ID NO: 2 - protein, 18 aa, Artificial Sequence
  Synthetic CDR set
MGWYRQAPGKERELVAGI

SEQ ID NO: 3 - protein, 37 aa, Artificial Sequence
  Synthetic CDR set
YADSVKGRFTISRDNAKNTVYLQMNSLKPEDTAVYYC

SEQ ID NO: 4 - protein, 11 aa, Artificial Sequence
  Synthetic CDR set
WGQGTQVTVSS

SEQ ID NO: 5 - protein, 8 aa, Artificial Sequence
  Synthetic CDR1 sequence
GIIFGRNA

SEQ ID NO: 6 - protein, 8 aa, Artificial Sequence
  Synthetic CDR2 sequence
TRRGSITY

SEQ ID NO: 7 - protein, 12 aa, Artificial Sequence
  Synthetic CDR3 sequence
AADPASPAPGDY

SEQ ID NO: 8 - protein, 8 aa, Artificial Sequence
  Synthetic CDR1 sequence
GYIFGRNA

SEQ ID NO: 9 - protein, 8 aa, Artificial Sequence
  Synthetic CDR2 sequence
TRRGSITY

SEQ ID NO: 10 - protein, 12 aa, Artificial Sequence
  Synthetic CDR3 sequence
AADPASPAYGDY

SEQ ID NO: 11 - protein, 8 aa, Artificial Sequence
  Synthetic CDR1 sequence
GIIFGRNA

SEQ ID NO: 12 - protein, 8 aa, Artificial Sequence
  Synthetic CDR2 sequence
TRRGSITY

SEQ ID NO: 13 - protein, 12 aa, Artificial Sequence
  Synthetic CDR3 sequence
AADPASPAPGDY

SEQ ID NO: 14 - protein, 8 aa, Artificial Sequence
  Synthetic CDR1 sequence
GYIFGRNA

SEQ ID NO: 15 - protein, 8 aa, Artificial Sequence
  Synthetic CDR2 sequence
TRRGSITY

SEQ ID NO: 16 - protein, 12 aa, Artificial Sequence
  Synthetic CDR3 sequence
AADPASPAYGDY

SEQ ID NO: 17 - protein, 8 aa, Artificial Sequence
  Synthetic CDR1 sequence
GSTLYQYA

SEQ ID NO: 18 - protein, 8 aa, Artificial Sequence
  Synthetic CDR2 sequence
SGSGTSTH

SEQ ID NO: 19 - protein, 15 aa, Artificial Sequence
  Synthetic CDR3 sequence
AAGYSWFWWTVDYDY

SEQ ID NO: 20 - protein, 7 aa, Artificial Sequence
  Synthetic CDR1 sequence
GFTYTYA

SEQ ID NO: 21 - protein, 7 aa, Artificial Sequence
  Synthetic CDR2 sequence
SNGGSTY

SEQ ID NO: 22 - protein, 15 aa, Artificial Sequence
  Synthetic CDR3 sequence
AVTALVWYDDDGYDY

SEQ ID NO: 23 - protein, 8 aa, Artificial Sequence
  Synthetic CDR1 sequence
GSIFLVNA

SEQ ID NO: 24 - protein, 8 aa, Artificial Sequence
  Synthetic CDR2 sequence
NWSGDSTY

SEQ ID NO: 25 - protein, 10 aa, Artificial Sequence
  Synthetic CDR3 sequence
NAYYPIDYDY

SEQ ID NO: 26 - protein, 8 aa, Artificial Sequence
  Synthetic CDR1 sequence
GRIFGVYA

SEQ ID NO: 27 - protein, 8 aa, Artificial Sequence
  Synthetic CDR2 sequence
TVDVTSTY

SEQ ID NO: 28 - protein, 14 aa, Artificial Sequence
  Synthetic CDR3 sequence
AALVSYWPYSEMDY

SEQ ID NO: 29 - protein, 7 aa, Artificial Sequence
  Synthetic CDR1 sequence
GSTFYNA

SEQ ID NO: 30 - protein, 8 aa, Artificial Sequence
  Synthetic CDR2 sequence
TASGGSTY

SEQ ID NO: 31 - protein, 12 aa, Artificial Sequence
  Synthetic CDR3 sequence
AAVYYRNLWYYY

SEQ ID NO: 32 - protein, 8 aa, Artificial Sequence
  Synthetic CDR1 sequence
GIIFGRNA

SEQ ID NO: 33 - protein, 8 aa, Artificial Sequence
  Synthetic CDR2 sequence
TRRGSITY

SEQ ID NO: 34 - protein, 12 aa, Artificial Sequence
  Synthetic CDR3 sequence
AADPASPAPGDY

SEQ ID NO: 35 - protein, 8 aa, Artificial Sequence
  Synthetic CDR1 sequence
GFTFKVNA

SEQ ID NO: 36 - protein, 7 aa, Artificial Sequence
  Synthetic CDR2 sequence
TIVGNTY

SEQ ID NO: 37 - protein, 13 aa, Artificial Sequence
  Synthetic CDR3 sequence
NTQEAYFYPKYGY

SEQ ID NO: 38 - protein, 8 aa, Artificial Sequence
  Synthetic CDR1 sequence
GNTFVAYA

SEQ ID NO: 39 - protein, 7 aa, Artificial Sequence
  Synthetic CDR2 sequence
SSTTSTY

SEQ ID NO: 40 - protein, 15 aa, Artificial Sequence
  Synthetic CDR3 sequence
ATYVYDRYYGWHMDY

SEQ ID NO: 41 - protein, 8 aa, Artificial Sequence
  Synthetic CDR1 sequence
GSTFQRYV

SEQ ID NO: 42 - protein, 9 aa, Artificial Sequence
  Synthetic CDR2 sequence
TNWSGGSTY

SEQ ID NO: 43 - protein, 14 aa, Artificial Sequence
  Synthetic CDR3 sequence
NADVYIPNFGIYDY

SEQ ID NO: 44 - protein, 8 aa, Artificial Sequence
  Synthetic CDR1 sequence
GNIFPLYA

SEQ ID NO: 45 - protein, 8 aa, Artificial Sequence
  Synthetic CDR2 sequence
TWSDGNTY

SEQ ID NO: 46 - protein, 21 aa, Artificial Sequence
  Synthetic CDR3 sequence
NAKYVQRTYFEDFYRYYQFDY

SEQ ID NO: 47 - protein, 8 aa, Artificial Sequence
  Synthetic CDR1 sequence
GLTFYAYA

SEQ ID NO: 48 - protein, 7 aa, Artificial Sequence
  Synthetic CDR2 sequence
SSGTSTY

SEQ ID NO: 49 - protein, 14 aa, Artificial Sequence
  Synthetic CDR3 sequence
AAVLYWYGVDSYEY

SEQ ID NO: 50 - protein, 8 aa, Artificial Sequence
  Synthetic CDR1 sequence
GSIFYSNA

SEQ ID NO: 51 - protein, 7 aa, Artificial Sequence
  Synthetic CDR2 sequence
TRSGGST

SEQ ID NO: 52 - protein, 19 aa, Artificial Sequence
  Synthetic CDR3 sequence
NADPRWRGPFQYTFVKGDY

SEQ ID NO: 53 - protein, 8 aa, Artificial Sequence
  Synthetic CDR1 sequence
GLIFDYYA

SEQ ID NO: 54 - protein, 8 aa, Artificial Sequence
  Synthetic CDR2 sequence
SQTGGSTY

SEQ ID NO: 55 - protein, 14 aa, Artificial Sequence
  Synthetic CDR3 sequence
AVEFDYFSGVIYNY

SEQ ID NO: 56 - protein, 8 aa, Artificial Sequence
  Synthetic CDR1 sequence
GFTIVWYV

SEQ ID NO: 57 - protein, 8 aa, Artificial Sequence
  Synthetic CDR2 sequence
TYSGARTY

SEQ ID NO: 58 - protein, 12 aa, Artificial Sequence
  Synthetic CDR3 sequence
AARTEYHPRYDY

SEQ ID NO: 59 - protein, 8 aa, Artificial Sequence
  Synthetic CDR1 sequence
GSTFELYV

SEQ ID NO: 60 - protein, 8 aa, Artificial Sequence
  Synthetic CDR2 sequence
NESGTITY

SEQ ID NO: 61 - protein, 14 aa, Artificial Sequence
  Synthetic CDR3 sequence
AAVRWSSYHYRENY

SEQ ID NO: 62 - protein, 8 aa, Artificial Sequence
  Synthetic CDR1 sequence
GIIFGRNA

SEQ ID NO: 63 - protein, 8 aa, Artificial Sequence
  Synthetic CDR2 sequence
TRTGGSTY

SEQ ID NO: 64 - protein, 11 aa, Artificial Sequence
  Synthetic CDR3 sequence
AADPFQFEYEY

SEQ ID NO: 65 - protein, 8 aa, Artificial Sequence
  Synthetic CDR1 sequence
GFTFWVNA

SEQ ID NO: 66 - protein, 8 aa, Artificial Sequence
  Synthetic CDR2 sequence
DYSGSRTY

SEQ ID NO: 67 - protein, 13 aa, Artificial Sequence
  Synthetic CDR3 sequence
AAERRYPRNPEDY

SEQ ID NO: 68 - protein, 8 aa, Artificial Sequence
  Synthetic CDR1 sequence
GSIFSVYA

SEQ ID NO: 69 - protein, 8 aa, Artificial Sequence
  Synthetic CDR2 sequence
TTSGASTY

SEQ ID NO: 70 - protein, 17 aa, Artificial Sequence
  Synthetic CDR3 sequence
AARLWARTSYYEYWFEY

SEQ ID NO: 71 - protein, 8 aa, Artificial Sequence
  Synthetic CDR1 sequence
GSIFVTYA

SEQ ID NO: 72 - protein, 8 aa, Artificial Sequence
  Synthetic CDR2 sequence
SWSSGTTY

SEQ ID NO: 73 - protein, 12 aa, Artificial Sequence
  Synthetic CDR3 sequence
NAVGYGKYLFDS

SEQ ID NO: 74 - protein, 8 aa, Artificial Sequence
  Synthetic CDR1 sequence
GSIFVTYA

SEQ ID NO: 75 - protein, 8 aa, Artificial Sequence
  Synthetic CDR2 sequence
TLSGASTY

SEQ ID NO: 76 - protein, 10 aa, Artificial Sequence
  Synthetic CDR3 sequence
AARDSWHVHY

SEQ ID NO: 77 - protein, 8 aa, Artificial Sequence
  Synthetic vhCDR1 sequence
  MISC_FEATURE (3)..(3): X can be Ile, Tyr, Trp, Phe, Val or Leu
GIXFGRNA

SEQ ID NO: 78 - protein, 8 aa, Artificial Sequence
  Synthetic vhCDR2 sequence
  MISC_FEATURE (4)..(4): X can be Gly, His, Tyr, or Gln
TRRXSITY

SEQ ID NO: 79 - protein, 12 aa, Artificial Sequence
  Synthetic vhCDR3 sequence
  MISC_FEATURE (6)..(6): X can be Ser, Val, Leu, Ile, or Thr
  MISC_FEATURE (9)..(9): X can be Pro, Phe, Trp, Tyr, Leu, or Val
AADPAXPAXGDY

SEQ ID NO: 80 - protein, 119 aa, Artificial Sequence
  Synthetic MASC protein AeroNab6mh
EVQLVESGGGLVQPGGSLRLSCAASGYIFGRNAMGWYRQAPGKGLELVAGITRRGSITYYADSVKGRFTISRDNSKNTLYLQMNSLRAEDTAVYYCAADPASPAYGDYWGQGTQVTVSS

SEQ ID NO: 81 - protein, 5 aa, Artificial Sequence
  Synthetic domain linker
GGGGS

SEQ ID NO: 82 - protein, 5 aa, Artificial Sequence
  Synthetic domain linker
GGGGS

SEQ ID NO: 83 - protein, 253 aa, Artificial Sequence
  Synthetic MASC protein AeroNab6mhX2
EVQLVESGGGLVQPGGSLRLSCAASGYIFGRNAMGWYRQAPGKGLELVAGITRRGSITYYADSVKGRFTISRDNSKNTLYLQMNSLRAEDTAVYYCAADPASPAYGDYWGQGTQVTVSSGGGGSGGGGSGGGGSEVQLVESGGGLVQPGGSLRLSCAASGYIFGRNAMGWYRQAPGKGLELVAGITRRGSITYYADSVKGRFTISRDNSKNTLYLQMNSLRAEDTAVYYCAADPASPAYGDYWGQGTQVTVSS

SEQ ID NO: 84 - protein, 258 aa, Artificial Sequence
  Synthetic MASC protein AeroNab6mhX2
EVQLVESGGGLVQPGGSLRLSCAASGYIFGRNAMGWYRQAPGKGLELVAGITRRGSITYYADSVKGRFTISRDNSKNTLYLQMNSLRAEDTAVYYCAADPASPAYGDYWGQGTQVTVSSGGGGSGGGGSGGGGSGGGGSEVQLVESGGGLVQPGGSLRLSCAASGYIFGRNAMGWYRQAPGKGLELVAGITRRGSITYYADSVKGRFTISRDNSKNTLYLQMNSLRAEDTAVYYCAADPASPAYGDYWGQGTQVTVSS

SEQ ID NO: 85 - protein, 387 aa, Artificial Sequence
  Synthetic MASC protein AeroNab6mhX3
EVQLVESGGGLVQPGGSLRLSCAASGYIFGRNAMGWYRQAPGKGLELVAGITRRGSITYYADSVKGRFTISRDNSKNTLYLQMNSLRAEDTAVYYCAADPASPAYGDYWGQGTQVTVSSGGGGSGGGGSGGGGSEVQLVESGGGLVQPGGSLRLSCAASGYIFGRNAMGWYRQAPGKGLELVAGITRRGSITYYADSVKGRFTISRDNSKNTLYLQMNSLRAEDTAVYYCAADPASPAYGDYWGQGTQVTVSSGGGGSGGGGSGGGGSEVQLVESGGGLVQPGGSLRLSCAASGYIFGRNAMGWYRQAPGKGLELVAGITRRGSITYYADSVKGRFTISRDNSKNTLYLQMNSLRAEDTAVYYCAADPASPAYGDYWGQGTQVTVSS

SEQ ID NO: 86 - protein, 397 aa, Artificial Sequence
  Synthetic MASC protein AeroNab6mhX3
EVQLVESGGGLVQPGGSLRLSCAASGYIFGRNAMGWYRQAPGKGLELVAGITRRGSITYYADSVKGRFTISRDNSKNTLYLQMNSLRAEDTAVYYCAADPASPAYGDYWGQGTQVTVSSGGGGSGGGGSGGGGSGGGGSEVQLVESGGGLVQPGGSLRLSCAASGYIFGRNAMGWYRQAPGKGLELVAGITRRGSITYYADSVKGRFTISRDNSKNTLYLQMNSLRAEDTAVYYCAADPASPAYGDYWGQGTQVTVSSGGGGSGGGGSGGGGSGGGGSEVQLVESGGGLVQPGGSLRLSCAASGYIFGRNAMGWYRQAPGKGLELVAGITRRGSITYYADSVKGRFTISRDNSKNTLYLQMNSLRAEDTAVYYCAADPASPAYGDYWGQGTQVTVSS

SEQ ID NO: 87 - protein, 119 aa, Artificial Sequence
  Synthetic MASC Protein
QVQLVESGGGLVQAGGSLRLSCAASGIIFGRNAMGWYRQAPGKERELVAGITRRGSITYYADSVKGRFTISRDNAKNTVYLQMNSLKPEDTAVYYCAADPASPAPGDYWGQGTQVTVSS

SEQ ID NO: 88 - protein, 8 aa, Artificial Sequence
  Synthetic vhCDR1 sequence
GIIFGRNA

SEQ ID NO: 89 - protein, 8 aa, Artificial Sequence
  Synthetic vhCDR2 sequence
TRRGSITY

SEQ ID NO: 90 - protein, 12 aa, Artificial Sequence
  Synthetic vhCDR3 sequence
AADPASPAPGDY

SEQ ID NO: 91 - protein, 119 aa, Artificial Sequence
  Synthetic mNbCOV6 protein
QVQLVESGGGLVQAGGSLRLSCAASGYIFGRNAMGWYRQAPGKERELVAGITRRGSITYYADSVKGRFTISRDNAKNTVYLQMNSLKPEDTAVYYCAADPASPAYGDYWGQGTQVTVSS

SEQ ID NO: 92 - protein, 8 aa, Artificial Sequence
  Synthetic mNbCOV6 protein
GYIFGRNA

SEQ ID NO: 93 - protein, 12 aa, Artificial Sequence
  Synthetic mNbCOV6 protein
AADPASPAYGDY

SEQ ID NO: 94 - protein, 8 aa, Artificial Sequence
  Synthetic NbCOV001 protein CDR1
GSTLYQYA

SEQ ID NO: 95 - protein, 7 aa, Artificial Sequence
  Synthetic NbCOV002 protein CDR1
GFTYTYA

SEQ ID NO: 96 - protein, 8 aa, Artificial Sequence
  Synthetic NbCOV003 protein CDR1
GSIFLVNA

SEQ ID NO: 97 - protein, 8 aa, Artificial Sequence
  Synthetic NbCOV004 protein CDR1
GRIFGVYA

SEQ ID NO: 98 - protein, 7 aa, Artificial Sequence
  Synthetic NbCOV005 protein CDR1
GSTFYNA

SEQ ID NO: 99 - protein, 8 aa, Artificial Sequence
  Synthetic NbCOV006 protein CDR1
GIIFGRNA

SEQ ID NO: 100 - protein, 8 aa, Artificial Sequence
  Synthetic NbCOV008 protein CDR1
GFTFKVNA

SEQ ID NO: 101 - protein, 8 aa, Artificial Sequence
  Synthetic NbCOV010 protein CDR1
GNTFVAYA

SEQ ID NO: 102 - protein, 8 aa, Artificial Sequence
  Synthetic NbCOV011 protein CDR1
GSTFQRYV

SEQ ID NO: 103 - protein, 8 aa, Artificial Sequence
  Synthetic NbCOV012D protein CDR1
GNIFPLYA

SEQ ID NO: 104 - protein, 8 aa, Artificial Sequence
  Synthetic NbCOV013 protein CDR1
GLTFYAYA

SEQ ID NO: 105 - protein, 8 aa, Artificial Sequence
  Synthetic NbCOV015 protein CDR1
GSIFYSNA

SEQ ID NO: 106 - protein, 8 aa, Artificial Sequence
  Synthetic NbCOV016 protein CDR1
GLIFDYYA

SEQ ID NO: 107 - protein, 8 aa, Artificial Sequence
  Synthetic NbCOV017 protein CDR1
GFTIVWYV

SEQ ID NO: 108 - protein, 8 aa, Artificial Sequence
  Synthetic NbCOV018 protein CDR1
GSTFELYV

SEQ ID NO: 109 - protein, 8 aa, Artificial Sequence
  Synthetic NbCOV019 protein CDR1
GIIFGRNA

SEQ ID NO: 110 - protein, 8 aa, Artificial Sequence
  Synthetic NbCOV021 protein CDR1
GFTFWVNA

SEQ ID NO: 111 - protein, 8 aa, Artificial Sequence
  Synthetic NbCOV022 protein CDR1
GSIFSVYA

SEQ ID NO: 112 - protein, 8 aa, Artificial Sequence
  Synthetic NbCOV024C protein CDR1
GSIFVTYA

SEQ ID NO: 113 - protein, 8 aa, Artificial Sequence
  Synthetic NbCOV024D protein CDR1
GSIFVTYA

SEQ ID NO: 114 - protein, 8 aa, Artificial Sequence
  Synthetic NbCOV001 protein CDR2
SGSGTSTH

SEQ ID NO: 115 - protein, 7 aa, Artificial Sequence
  Synthetic NbCOV002 protein CDR2
SNGGSTY

SEQ ID NO: 116 - protein, 8 aa, Artificial Sequence
  Synthetic NbCOV003 protein CDR2
NWSGDSTY

SEQ ID NO: 117 - protein, 8 aa, Artificial Sequence
  Synthetic NbCOV004 protein CDR2
TVDVTSTY

SEQ ID NO: 118 - protein, 8 aa, Artificial Sequence
  Synthetic NbCOV005 protein CDR2
TASGGSTY

SEQ ID NO: 119 - protein, 8 aa, Artificial Sequence
  Synthetic NbCOV006 protein CDR2
TRRGSITY

SEQ ID NO: 120 - protein, 7 aa, Artificial Sequence
  Synthetic NbCOV008 protein CDR2
TIVGNTY

SEQ ID NO: 121 - protein, 7 aa, Artificial Sequence
  Synthetic NbCOV010 protein CDR2
SSTTSTY

SEQ ID NO: 122 - protein, 9 aa, Artificial Sequence
  Synthetic NbCOV011 protein CDR2
TNWSGGSTY

SEQ ID NO: 123 - protein, 8 aa, Artificial Sequence
  Synthetic NbCOV012D protein CDR2
TWSDGNTY

SEQ ID NO: 124 - protein, 7 aa, Artificial Sequence
  Synthetic NbCOV013 protein CDR2
SSGTSTY

SEQ ID NO: 125 - protein, 7 aa, Artificial Sequence
  Synthetic NbCOV015 protein CDR2
TRSGGST

SEQ ID NO: 126 - protein, 8 aa, Artificial Sequence
  Synthetic NbCOV016 protein CDR2
SQTGGSTY

SEQ ID NO: 127 - protein, 8 aa, Artificial Sequence
  Synthetic NbCOV017 protein CDR2
TYSGARTY

SEQ ID NO: 128 - protein, 8 aa, Artificial Sequence
  Synthetic NbCOV018 protein CDR2
NESGTITY

SEQ ID NO: 129 - protein, 8 aa, Artificial Sequence
  Synthetic NbCOV019 protein CDR2
TRTGGSTY

SEQ ID NO: 130 - protein, 8 aa, Artificial Sequence
  Synthetic NbCOV021 protein CDR2
DYSGSRTY

SEQ ID NO: 131 - protein, 8 aa, Artificial Sequence
  Synthetic NbCOV022 protein CDR2
TTSGASTY

SEQ ID NO: 132 - protein, 8 aa, Artificial Sequence
  Synthetic NbCOV024C protein CDR2
SWSSGTTY

SEQ ID NO: 133 - protein, 8 aa, Artificial Sequence
  Synthetic NbCOV024D protein CDR2
TLSGASTY

SEQ ID NO: 134 - protein, 15 aa, Artificial Sequence
  Synthetic NbCOV001 protein CDR3
AAGYSWFWWTVDYDY

SEQ ID NO: 135 - protein, 15 aa, Artificial Sequence
  Synthetic NbCOV002 protein CDR3
AVTALVWYDDDGYDY

SEQ ID NO: 136 - protein, 10 aa, Artificial Sequence
  Synthetic NbCOV003 protein CDR3
NAYYPIDYDY

SEQ ID NO: 137 - protein, 14 aa, Artificial Sequence
  Synthetic NbCOV004 protein CDR3
AALVSYWPYSEMDY

SEQ ID NO: 138 - protein, 12 aa, Artificial Sequence
  Synthetic NbCOV005 protein CDR3
AAVYYRNLWYYY

SEQ ID NO: 139 - protein, 12 aa, Artificial Sequence
  Synthetic NbCOV006 protein CDR3
AADPASPAPGDY

SEQ ID NO: 140 - protein, 13 aa, Artificial Sequence
  Synthetic NbCOV008 protein CDR3
NTQEAYFYPKYGY

SEQ ID NO: 141 - protein, 15 aa, Artificial Sequence
  Synthetic NbCOV010 protein CDR3
ATYVYDRYYGWHMDY

SEQ ID NO: 142 - protein, 14 aa, Artificial Sequence
  Synthetic NbCOV011 protein CDR3
NADVYIPNFGIYDY

SEQ ID NO: 143 - protein, 21 aa, Artificial Sequence
  Synthetic NbCOV012D protein CDR3
NAKYVQRTYFEDFYRYYQFDY

SEQ ID NO: 144 - protein, 14 aa, Artificial Sequence
  Synthetic NbCOV013 protein CDR3
AAVLYWYGVDSYEY

SEQ ID NO: 145 - protein, 19 aa, Artificial Sequence
  Synthetic NbCOV015 protein CDR3
NADPRWRGPFQYTFVKGDY

SEQ ID NO: 146 - protein, 14 aa, Artificial Sequence
  Synthetic NbCOV016 protein CDR3
AVEFDYFSGVIYNY

SEQ ID NO: 147 - protein, 12 aa, Artificial Sequence
  Synthetic NbCOV017 protein CDR3
AARTEYHPRYDY

SEQ ID NO: 148 - protein, 14 aa, Artificial Sequence
  Synthetic NbCOV018 protein CDR3
AAVRWSSYHYRENY

SEQ ID NO: 149 - protein, 11 aa, Artificial Sequence
  Synthetic NbCOV019 protein CDR3
AADPFQFEYEY

SEQ ID NO: 150 - protein, 13 aa, Artificial Sequence
  Synthetic NbCOV021 protein CDR3
AAERRYPRNPEDY

SEQ ID NO: 151 - protein, 17 aa, Artificial Sequence
  Synthetic NbCOV022 protein CDR3
AARLWARTSYYEYWFEY

SEQ ID NO: 152 - protein, 12 aa, Artificial Sequence
  Synthetic NbCOV024C protein CDR3
NAVGYGKYLFDS

SEQ ID NO: 153 - protein, 10 aa, Artificial Sequence
  Synthetic NbCOV024D protein CDR3
AARDSWHVHY

SEQ ID NO: 154 - protein, 122 aa, Artificial Sequence
  Synthetic full length sequence sdABD of MASC protein clone
QVQLVESGGGLVQAGGSLRLSCAASGSTLYQYAMGWYRQAPGKERELVASISGSGTSTHYADSVKGRFTISRDNAKNTVYLQMNSLKPEDTAVYYCAAGYSWFWWTVDYDYWGQGTQVTVSS

SEQ ID NO: 155 - protein, 120 aa, Artificial Sequence
  Synthetic full length sequence sdABD of MASC protein clone
QVQLVESGGGLVQAGGSLRLSCAASGFTYTYAMGWYRQAPGKERELVAVISNGGSTYYADSVKGRFTISRDNAKNTVYLQMNSLKPEDTAVYYCAVTALVWYDDDGYDYWGQGTQVTVSS

SEQ ID NO: 156 - protein, 117 aa, Artificial Sequence
  Synthetic full length sequence sdABD of MASC protein clone
QVQLVESGGGLVQAGGSLRLSCAASGSIFLVNAMGWYRQAPGKERELVAAINWSGDSTYYADSVKGRFTISRDNAKNTVYLQMNSLKPEDTAVYYCNAYYPIDYDYWGQGTQVTVSS

SEQ ID NO: 157 - protein, 121 aa, Artificial Sequence
  Synthetic full length sequence sdABD of MASC protein clone
QVQLVESGGGLVQAGGSLRLSCAASGRIFGVYAMGWYRQAPGKEREFVAAITVDVTSTYYADSVKGRFTISRDNAKNTVYLQMNSLKPEDTAVYYCAALVSYWPYSEMDYWGQGTQVTVSS

SEQ ID NO: 158 - protein, 118 aa, Artificial Sequence
  Synthetic full length sequence sdABD of MASC protein clone
QVQLVESGGGLVQAGGSLRLSCAASGSTFYNAMGWYRQAPGKEREFVAAITASGGSTYYADSVKGRFTISRDNAKNTVYLQMNSLKPEDTAVYYCAAVYYRNLWYYYWGQGTQVTVSS

SEQ ID NO: 159 - protein, 119 aa, Artificial Sequence; identical to SEQ ID NO: 87
  Synthetic full length sequence sdABD of MASC protein clone

SEQ ID NO: 160 - protein, 119 aa, Artificial Sequence
  Synthetic full length sequence sdABD of MASC protein clone
QVQLVESGGGLVQAGGSLRLSCAASGFTFKVNAMGWYRQAPGKERELVARITIVGNTYYADSVKGRFTISRDNAKNTVYLQMNSLKPEDTAVYYCNTQEAYFYPKYGYWGQGTQVTVSS

SEQ ID NO: 161 - protein, 122 aa, Artificial Sequence; identical to SEQ ID NO: 154
  Synthetic full length sequence sdABD of MASC protein clone

SEQ ID NO: 162 - protein, 121 aa, Artificial Sequence
  Synthetic full length sequence sdABD of MASC protein clone
QVQLVESGGGLVQAGGSLRLSCAASGNTFVAYAMGWYRQAPGKERELVAAISSTTSTYYADSVKGRFTISRDNAKNTVYLQMNSLKPEDTAVYYCATYVYDRYYGWHMDYWGQGTQVTVSS

SEQ ID NO: 163 - protein, 122 aa, Artificial Sequence
  Synthetic full length sequence sdABD of MASC protein clone
QVQLVESGGGLVQAGGSLRLSCAASGSTFQRYVMGWYRQAPGKERELVAAITNWSGGSTYYADSVKGRFTISRDNAKNTVYLQMNSLKPEDTAVYYCNADVYIPNFGIYDYWGQGTQVTVSS

SEQ ID NO: 164 - protein, 129 aa, Artificial Sequence
  Synthetic full length sequence sdABD of MASC protein clone
QVQLVESGGGLVQAGGSLRLSCAASGNIFPLYAMGWYRQAPGKERELVAAITWSDGNTYYADSVKGRFTISRDNAKNTVYLQMNSLKPEDTAVYYCNAKYVQRTYFEDFYRYYQFDYWGQGTQVTVSSH

SEQ ID NO: 165 - protein, 121 aa, Artificial Sequence
  Synthetic full length sequence sdABD of MASC protein clone
QVQLVESGGGLVQAGGSLRLSCAASGSIFIVYAMGWYRQAPGKERELVAVITGSGDSTYYADSVKGRFTISRDNAKNTVYLQMNSLKPEDTAVYYCNADYVLTPQYERDYWGQGTQVTVSS

SEQ ID NO: 166 - protein, 120 aa, Artificial Sequence
  Synthetic full length sequence sdABD of MASC protein clone
QVQLVESGGGLVQAGGSLRLSCAASGLTFYAYAMGWYRQAPGKERELVAAISSGTSTYYADSVKGRFTISRDNAKNTVYLQMNSLKPEDTAVYYCAAVLYWYGVDSYEYWGQGTQVTVSS

SEQ ID NO: 167 - protein, 120 aa, Artificial Sequence; identical to SEQ ID NO: 166
  Synthetic full length sequence sdABD of MASC protein clone

SEQ ID NO: 168 - protein, 125 aa, Artificial Sequence
  Synthetic full length sequence sdABD of MASC protein clone
QVQLVESGGGLVQAGGSLRLSCAASGSIFYSNAMGWYRQAPGKERELVASITRSGGSTYADSVKGRFTISRDNAKNTVYLQMNSLKPEDTAVYYCNADPRWRGPFQYTFVKGDYWGQGTQVTVSS

SEQ ID NO: 169 - protein, 121 aa, Artificial Sequence
  Synthetic full length sequence sdABD of MASC protein clone
QVQLVESGGGLVQAGGSLRLSCAASGLIFDYYAMGWYRQAPGKERELVARISQTGGSTYYADSVKGRFTISRDNAKNTVYLQMNSLKPEDTAVYYCAVEFDYFSGVIYNYWGQGTQVTVSS

SEQ ID NO: 170 - protein, 119 aa, Artificial Sequence
  Synthetic full length sequence sdABD of MASC protein clone
QVQLVESGGGLVQAGGSLRLSCAASGFTIVWYVMGWYRQAPGKERELVAAITYSGARTYYADSVKGRFTISRDNAKNTVYLQMNSLKPEDTAVYYCAARTEYHPRYDYWGQGTQVTVSS

SEQ ID NO: 171 - protein, 121 aa, Artificial Sequence
  Synthetic full length sequence sdABD of MASC protein clone
QVQLVESGGGLVQAGGSLRLSCAASGSTFELYVMGWYRQAPGKERELVAAINESGTITYYADSVKGRFTISRDNAKNTVYLQMNSLKPEDTAVYYCAAVRWSSYHYRENYWGQGTQVTVSS

SEQ ID NO: 172 - protein, 118 aa, Artificial Sequence
  Synthetic full length sequence sdABD of MASC protein clone
QVQLVESGGGLVQAGGSLRLSCAASGIIFGRNAMGWYRQAPGKERELVAAITRTGGSTYYADSVKGRFTISRDNAKNTVYLQMNSLKPEDTAVYYCAADPFQFEYEYWGQGTQVTVSS

SEQ ID NO: 173 - protein, 122 aa, Artificial Sequence; identical to SEQ ID NO: 163
  Synthetic full length sequence sdABD of MASC protein clone

SEQ ID NO: 174 - protein, 120 aa, Artificial Sequence
  Synthetic full length sequence sdABD of MASC protein clone
QVQLVESGGGLVQAGGSLRLSCAASGFTFWVNAMGWYRQAPGKEREFVAAIDYSGSRTYYADSVKGRFTISRDNAKNTVYLQMNSLKPEDTAVYYCAAERRYPRNPEDYWGQGTQVTVSS

SEQ ID NO: 175 - protein, 124 aa, Artificial Sequence
  Synthetic full length sequence sdABD of MASC protein clone
QVQLVESGGGLVQAGGSLRLSCAASGSIFSVYAMGWYRQAPGKERELVATITTSGASTYYADSVKGRFTISRDNAKNTVYLQMNSLKPEDTAVYYCAARLWARTSYYEYWFEYWGQGTQVTVSS

SEQ ID NO: 176 - protein, 122 aa, Artificial Sequence; identical to SEQ ID NO: 154
  Synthetic full length sequence sdABD of MASC protein clone

SEQ ID NO: 177 - protein, 119 aa, Artificial Sequence
  Synthetic full length sequence sdABD of MASC protein clone
QVQLVESGGGLVQAGGSLRLSCAASGSIFVTYAMGWYRQAPGKEREFVAVISWSSGTTYYADSVKGRFTISRDNAKNTVYLQMNSLKPEDTAVYYCNAVGYGKYLFDSWGQGTQVTVSS

SEQ ID NO: 178 - protein, 117 aa, Artificial Sequence
  Synthetic full length sequence sdABD of MASC protein clone
QVQLVESGGGLVQAGGSLRLSCAASGSIFVTYAMGWYRQAPGKEREFVAAITLSGASTYYADSVKGRFTISRDNAKNTVYLQMNSLKPEDNAVYYCAARDSWHVHYWGQGTQVTVSS

SEQ ID NO: 179 - protein, 12 aa, Artificial Sequence
  Synthetic MASC protein CDR3
AADPASPAPGDY

SEQ ID NO: 180 - protein, 12 aa, Artificial Sequence
  Synthetic MASC protein CDR3
AADPASPAYGDY

SEQ ID NO: 181 - protein, 12 aa, Artificial Sequence
  Synthetic MASC protein CDR3
AADPASPAFGDY

SEQ ID NO: 182 - protein, 12 aa, Artificial Sequence
  Synthetic MASC protein CDR3
AADPASPAWGDY

SEQ ID NO: 183 - protein, 12 aa, Artificial Sequence
  Synthetic MASC protein CDR3
AADPAVPAPGDY

SEQ ID NO: 184 - protein, 12 aa, Artificial Sequence
  Synthetic MASC protein CDR3
AADPAVPAYGDY

SEQ ID NO: 185 - protein, 12 aa, Artificial Sequence
  Synthetic MASC protein CDR3
AADPAVPAFGDY

SEQ ID NO: 186 - protein, 12 aa, Artificial Sequence
  Synthetic MASC protein CDR3
AADPAVPAWGDY

SEQ ID NO: 187 - protein, 12 aa, Artificial Sequence
  Synthetic MASC protein CDR3
AADPALPAPGDY

SEQ ID NO: 188 - protein, 12 aa, Artificial Sequence
  Synthetic MASC protein CDR3
AADPALPAYGDY

SEQ ID NO: 189 - protein, 12 aa, Artificial Sequence
  Synthetic MASC protein CDR3
AADPALPAFGDY

SEQ ID NO: 190 - protein, 12 aa, Artificial Sequence
  Synthetic MASC protein CDR3
AADPALPAWGDY

SEQ ID NO: 191 - protein, 12 aa, Artificial Sequence
  Synthetic MASC protein CDR3
AADPAIPAPGDY

SEQ ID NO: 192 - protein, 12 aa, Artificial Sequence
  Synthetic MASC protein CDR3
AADPAIPAYGDY

SEQ ID NO: 193 - protein, 12 aa, Artificial Sequence
  Synthetic MASC protein CDR3
AADPAIPAFGDY

SEQ ID NO: 194 - protein, 12 aa, Artificial Sequence
  Synthetic MASC protein CDR3
AADPAIPAWGDY

SEQ ID NO: 195 - protein, 12 aa, Artificial Sequence
  Synthetic MASC protein CDR3
AADPATPAPGDY

SEQ ID NO: 196 - protein, 12 aa, Artificial Sequence
  Synthetic MASC protein CDR3
AADPATPAYGDY

SEQ ID NO: 197 - protein, 12 aa, Artificial Sequence
  Synthetic MASC protein CDR3
AADPATPAFGDY

SEQ ID NO: 198 - protein, 12 aa, Artificial Sequence
  Synthetic MASC protein CDR3
AADPATPAWGDY

SEQ ID NO: 199 - protein, 12 aa, Artificial Sequence
  Synthetic MASC protein CDR3
AADPASPAPGDY

SEQ ID NO: 200 - protein, 12 aa, Artificial Sequence
  Synthetic MASC protein CDR3
AADPASPAYGDY

SEQ ID NO: 201 - protein, 12 aa, Artificial Sequence
  Synthetic MASC protein CDR3
AADPASPAFGDY

SEQ ID NO: 202 - protein, 12 aa, Artificial Sequence
  Synthetic MASC protein CDR3
AADPASPAWGDY

SEQ ID NO: 203 - protein, 12 aa, Artificial Sequence
  Synthetic MASC protein CDR3
AADPAVPAPGDY

SEQ ID NO: 204 - protein, 12 aa, Artificial Sequence
  Synthetic MASC protein CDR3
AADPAVPAYGDY

SEQ ID NO: 205 - protein, 12 aa, Artificial Sequence
  Synthetic MASC protein CDR3
AADPAVPAFGDY

SEQ ID NO: 206 - protein, 12 aa, Artificial Sequence
  Synthetic MASC protein CDR3
AADPAVPAWGDY

SEQ ID NO: 207 - protein, 12 aa, Artificial Sequence
  Synthetic MASC protein CDR3
AADPALPAPGDY

SEQ ID NO: 208 - protein, 12 aa, Artificial Sequence
  Synthetic MASC protein CDR3
AADPALPAYGDY

SEQ ID NO: 209 - protein, 12 aa, Artificial Sequence
  Synthetic MASC protein CDR3
AADPALPAFGDY

SEQ ID NO: 210 - protein, 12 aa, Artificial Sequence
  Synthetic MASC protein CDR3
AADPALPAWGDY

SEQ ID NO: 211 - protein, 12 aa, Artificial Sequence
  Synthetic MASC protein CDR3
AADPAIPAPGDY

SEQ ID NO: 212 - protein, 12 aa, Artificial Sequence
  Synthetic MASC protein CDR3
AADPAIPAYGDY

SEQ ID NO: 213 - protein, 12 aa, Artificial Sequence
  Synthetic MASC protein CDR3
AADPAIPAFGDY

SEQ ID NO: 214 - protein, 12 aa, Artificial Sequence
  Synthetic MASC protein CDR3
AADPAIPAWGDY

SEQ ID NO: 215 - protein, 12 aa, Artificial Sequence
  Synthetic MASC protein CDR3
AADPATPAPGDY

SEQ ID NO: 216 - protein, 12 aa, Artificial Sequence
  Synthetic MASC protein CDR3
AADPATPAYGDY

SEQ ID NO: 217 - protein, 12 aa, Artificial Sequence
  Synthetic MASC protein CDR3
AADPATPAFGDY

SEQ ID NO: 218 - protein, 12 aa, Artificial Sequence
  Synthetic MASC protein CDR3
AADPATPAWGDY

SEQ ID NO: 219 - protein, 12 aa, Artificial Sequence
  Synthetic MASC protein CDR3
AADPASPAPGDY

SEQ ID NO: 220 - protein, 12 aa, Artificial Sequence
  Synthetic MASC protein CDR3
AADPASPAYGDY

SEQ ID NO: 221 - protein, 12 aa, Artificial Sequence
  Synthetic MASC protein CDR3
AADPASPAFGDY

SEQ ID NO: 222 - protein, 12 aa, Artificial Sequence
  Synthetic MASC protein CDR3
AADPASPAWGDY

SEQ ID NO: 223 - protein, 12 aa, Artificial Sequence
  Synthetic MASC protein CDR3
AADPAVPAPGDY

SEQ ID NO: 224 - protein, 12 aa, Artificial Sequence
  Synthetic MASC protein CDR3
AADPAVPAYGDY

SEQ ID NO: 225 - protein, 12 aa, Artificial Sequence
  Synthetic MASC protein CDR3
AADPAVPAFGDY

SEQ ID NO: 226 - protein, 12 aa, Artificial Sequence
  Synthetic MASC protein CDR3
AADPAVPAWGDY

SEQ ID NO: 227 - protein, 12 aa, Artificial Sequence
  Synthetic MASC protein CDR3
AADPALPAPGDY

SEQ ID NO: 228 - protein, 12 aa, Artificial Sequence
  Synthetic MASC protein CDR3
AADPALPAYGDY

SEQ ID NO: 229 - protein, 12 aa, Artificial Sequence
  Synthetic MASC protein CDR3
AADPALPAFGDY

SEQ ID NO: 230 - protein, 12 aa, Artificial Sequence
  Synthetic MASC protein CDR3
AADPALPAWGDY

SEQ ID NO: 231 - protein, 12 aa, Artificial Sequence
  Synthetic MASC protein CDR3
AADPAIPAPGDY

SEQ ID NO: 232 - protein, 12 aa, Artificial Sequence
  Synthetic MASC protein CDR3
AADPAIPAYGDY

SEQ ID NO: 233 - protein, 12 aa, Artificial Sequence
  Synthetic MASC protein CDR3
AADPAIPAFGDY

SEQ ID NO: 234 - protein, 12 aa, Artificial Sequence
  Synthetic MASC protein CDR3
AADPAIPAWGDY

SEQ ID NO: 235 - protein, 12 aa, Artificial Sequence
  Synthetic MASC protein CDR3
AADPATPAPGDY

SEQ ID NO: 236 - protein, 12 aa, Artificial Sequence
  Synthetic MASC protein CDR3
AADPATPAYGDY

SEQ ID NO: 237 - protein, 12 aa, Artificial Sequence
  Synthetic MASC protein CDR3
AADPATPAFGDY

SEQ ID NO: 238 - protein, 12 aa, Artificial Sequence
  Synthetic MASC protein CDR3
AADPATPAWGDY

SEQ ID NO: 239 - protein, 12 aa, Artificial Sequence
  Synthetic MASC protein CDR3
AADPASPAPGDY

SEQ ID NO: 240 - protein, 12 aa, Artificial Sequence
  Synthetic MASC protein CDR3
AADPASPAYGDY

SEQ ID NO: 241 - protein, 12 aa, Artificial Sequence
  Synthetic MASC protein CDR3
AADPASPAFGDY

SEQ ID NO: 242 - protein, 12 aa, Artificial Sequence
  Synthetic MASC protein CDR3
AADPASPAWGDY

SEQ ID NO: 243 - protein, 12 aa, Artificial Sequence
  Synthetic MASC protein CDR3
AADPAVPAPGDY

SEQ ID NO: 244 - protein, 12 aa, Artificial Sequence
  Synthetic MASC protein CDR3
AADPAVPAYGDY

SEQ ID NO: 245 - protein, 12 aa, Artificial Sequence
  Synthetic MASC protein CDR3
AADPAVPAFGDY

SEQ ID NO: 246 - protein, 12 aa, Artificial Sequence
  Synthetic MASC protein CDR3
AADPAVPAWGDY

SEQ ID NO: 247 - protein, 12 aa, Artificial Sequence
  Synthetic MASC protein CDR3
AADPALPAPGDY

SEQ ID NO: 248 - protein, 12 aa, Artificial Sequence
  Synthetic MASC protein CDR3
AADPALPAYGDY

SEQ ID NO: 249 - protein, 12 aa, Artificial Sequence
  Synthetic MASC protein CDR3
AADPALPAFGDY

SEQ ID NO: 250 - protein, 12 aa, Artificial Sequence
  Synthetic MASC protein CDR3
AADPALPAWGDY

SEQ ID NO: 251 - protein, 12 aa, Artificial Sequence
  Synthetic MASC protein CDR3
AADPAIPAPGDY

SEQ ID NO: 252 - protein, 12 aa, Artificial Sequence
  Synthetic MASC protein CDR3
AADPAIPAYGDY

SEQ ID NO: 253 - protein, 12 aa, Artificial Sequence
  Synthetic MASC protein CDR3
AADPAIPAFGDY

SEQ ID NO: 254 - protein, 12 aa, Artificial Sequence
  Synthetic MASC protein CDR3
AADPAIPAWGDY

SEQ ID NO: 255 - protein, 12 aa, Artificial Sequence
  Synthetic MASC protein CDR3
AADPATPAPGDY

SEQ ID NO: 256 - protein, 12 aa, Artificial Sequence
  Synthetic MASC protein CDR3
AADPATPAYGDY

SEQ ID NO: 257 - protein, 12 aa, Artificial Sequence
  Synthetic MASC protein CDR3
AADPATPAFGDY

SEQ ID NO: 258 - protein, 12 aa, Artificial Sequence
  Synthetic MASC protein CDR3
AADPATPAWGDY

SEQ ID NO: 259 - protein, 12 aa, Artificial Sequence
  Synthetic MASC protein CDR3
AADPASPAPGDY

SEQ ID NO: 260 - protein, 12 aa, Artificial Sequence
  Synthetic MASC protein CDR3
AADPASPAYGDY

SEQ ID NO: 261 - protein, 12 aa, Artificial Sequence
  Synthetic MASC protein CDR3
AADPASPAFGDY

SEQ ID NO: 262 - protein, 12 aa, Artificial Sequence
  Synthetic MASC protein CDR3
AADPASPAWGDY

SEQ ID NO: 263 - protein, 12 aa, Artificial Sequence
  Synthetic MASC protein CDR3
AADPAVPAPGDY

SEQ ID NO: 264 - protein, 12 aa, Artificial Sequence
  Synthetic MASC protein CDR3
AADPAVPAYGDY

SEQ ID NO: 265 - protein, 12 aa, Artificial Sequence
  Synthetic MASC protein CDR3
AADPAVPAFGDY

SEQ ID NO: 266 - protein, 12 aa, Artificial Sequence
  Synthetic MASC protein CDR3
AADPAVPAWGDY

SEQ ID NO: 267 - protein, 12 aa, Artificial Sequence
  Synthetic MASC protein CDR3
AADPALPAPGDY

SEQ ID NO: 268 - protein, 12 aa, Artificial Sequence
  Synthetic MASC protein CDR3
AADPALPAYGDY

SEQ ID NO: 269 - protein, 12 aa, Artificial Sequence
  Synthetic MASC protein CDR3
AADPALPAFGDY

SEQ ID NO: 270 - protein, 12 aa, Artificial Sequence
  Synthetic MASC protein CDR3
AADPALPAWGDY

SEQ ID NO: 271 - protein, 12 aa, Artificial Sequence
  Synthetic MASC protein CDR3
AADPAIPAPGDY

SEQ ID NO: 272 - protein, 12 aa, Artificial Sequence
  Synthetic MASC protein CDR3
AADPAIPAYGDY

SEQ ID NO: 273 - protein, 12 aa, Artificial Sequence
  Synthetic MASC protein CDR3
AADPAIPAFGDY

SEQ ID NO: 274 - protein, 12 aa, Artificial Sequence
  Synthetic MASC protein CDR3
AADPAIPAWGDY

SEQ ID NO: 275 - protein, 12 aa, Artificial Sequence
  Synthetic MASC protein CDR3
AADPATPAPGDY

SEQ ID NO: 276 - protein, 12 aa, Artificial Sequence
  Synthetic MASC protein CDR3
AADPATPAYGDY

SEQ ID NO: 277 - protein, 12 aa, Artificial Sequence
  Synthetic MASC protein CDR3
AADPATPAFGDY

SEQ ID NO: 278 - protein, 12 aa, Artificial Sequence
  Synthetic MASC protein CDR3
AADPATPAWGDY

SEQ ID NO: 279 - protein, 12 aa, Artificial Sequence
  Synthetic MASC protein CDR3
AADPASPAPGDY

SEQ ID NO: 280 - protein, 12 aa, Artificial Sequence
  Synthetic MASC protein CDR3
AADPASPAYGDY

SEQ ID NO: 281 - protein, 12 aa, Artificial Sequence
  Synthetic MASC protein CDR3
AADPASPAFGDY

SEQ ID NO: 282 - protein, 12 aa, Artificial Sequence
  Synthetic MASC protein CDR3
AADPASPAWGDY

SEQ ID NO: 283 - protein, 12 aa, Artificial Sequence
  Synthetic MASC protein CDR3
AADPAVPAPGDY

SEQ ID NO: 284 - protein, 12 aa, Artificial Sequence
  Synthetic MASC protein CDR3
AADPAVPAYGDY

SEQ ID NO: 285 - protein, 12 aa, Artificial Sequence
  Synthetic MASC protein CDR3
AADPAVPAFGDY

SEQ ID NO: 286 - protein, 12 aa, Artificial Sequence
  Synthetic MASC protein CDR3
AADPAVPAWGDY

SEQ ID NO: 287 - protein, 12 aa, Artificial Sequence
  Synthetic MASC protein CDR3
AADPALPAPGDY

SEQ ID NO: 288 - protein, 12 aa, Artificial Sequence
  Synthetic MASC protein CDR3
AADPALPAYGDY

SEQ ID NO: 289 - protein, 12 aa, Artificial Sequence
  Synthetic MASC protein CDR3
AADPALPAFGDY

SEQ ID NO: 290 - protein, 12 aa, Artificial Sequence
  Synthetic MASC protein CDR3
AADPALPAWGDY

SEQ ID NO: 291 - protein, 12 aa, Artificial Sequence
  Synthetic MASC protein CDR3
AADPAIPAPGDY

SEQ ID NO: 292 - protein, 12 aa, Artificial Sequence
  Synthetic MASC protein CDR3
AADPAIPAYGDY

SEQ ID NO: 293 - protein, 12 aa, Artificial Sequence
  Synthetic MASC protein CDR3
AADPAIPAFGDY

SEQ ID NO: 294 - protein, 12 aa, Artificial Sequence
  Synthetic MASC protein CDR3
AADPAIPAWGDY

SEQ ID NO: 295 - protein, 12 aa, Artificial Sequence
  Synthetic MASC protein CDR3
AADPATPAPGDY

SEQ ID NO: 296 - protein, 12 aa, Artificial Sequence
  Synthetic MASC protein CDR3
AADPATPAYGDY

SEQ ID NO: 297 - protein, 12 aa, Artificial Sequence
  Synthetic MASC protein CDR3
AADPATPAFGDY

SEQ ID NO: 298 - protein, 12 aa, Artificial Sequence
  Synthetic MASC protein CDR3
AADPATPAWGDY

SEQ ID NO: 299 - protein, 12 aa, Artificial Sequence
  Synthetic MASC protein CDR3
AADPASPAPGDY

SEQ ID NO: 300 - protein, 1273 aa, Artificial Sequence
  Synthetic antigen protein sequence
MFVFLVLLPLVSSQCVNLTTRTQLPPAYTNSFTRGVYYPDKVFRSSVLHSTQDLFLPFFSNVTWFHAIHVSGTNGTKRFDNPVLPFNDGVYFASTEKSNIIRGWIFGTTLDSKTQSLLIVNNATNVVIKVCEFQFCNDPFLGVYYHKNNKSWMESEFRVYSSANNCTFEYVSQPFLMDLEGKQGNFKNLREFVFKNIDGYFKIYSKHTPINLVRDLPQGFSALEPLVDLPIGINITRFQTLLALHRSYLTPGDSSSGWTAGAAAYYVGYLQPRTFLLKYNENGTITDAVDCALDPLSETKCTLKSFTVEKGIYQTSNFRVQPTESIVRFPNITNLCPFGEVFNATRFASVYAWNRKRISNCVADYSVLYNSASFSTFKCYGVSPTKLNDLCFTNVYADSFVIRGDEVRQIAPGQTGKIADYNYKLPDDFTGCVIAWNSNNLDSKVGGNYNYLYRLFRKSNLKPFERDISTEIYQAGSTPCNGVEGFNCYFPLQSYGFQPTNGVGYQPYRVVVLSFELLHAPATVCGPKKSTNLVKNKCVNFNFNGLTGTGVLTESNKKFLPFQQFGRDIADTTDAVRDPQTLEILDITPCSFGGVSVITPGTNTSNQVAVLYQDVNCTEVPVAIHADQLTPTWRVYSTGSNVFQTRAGCLIGAEHVNNSYECDIPIGAGICASYQTQTNSPRRARSVASQSIIAYTMSLGAENSVAYSNNSIAIPTNFTISVTTEILPVSMTKTSVDCTMYICGDSTECSNLLLQYGSFCTQLNRALTGIAVEQDKNTQEVFAQVKQIYKTPPIKDFGGFNFSQILPDPSKPSKRSFIEDLLFNKVTLADAGFIKQYGDCLGDIAARDLICAQKFNGLTVLPPLLTDEMIAQYTSALLAGTITSGWTFGAGAALQIPFAMQMAYRFNGIGVTQNVLYENQKLIANQFNSAIGKIQDSLSSTASALGKLQDVVNQNAQALNTLVKQLSSNFGAISSVLNDILSRLDKVEAEVQIDRLITGRLQSLQTYVTQQLIRAAEIRASANLAATKMSECVLGQSKRVDFCGKGYHLMSFPQSAPHGVVFLHVTYVPAQEKNFTTAPAICHDGKAHFPREGVFVSNGTHWFVTQRNFYEPQIITTDNTFVSGNCDVVIGIVNNTVYDPLQPELDSFKEELDKYFKNHTSPDVDLGDISGINASVVNIQKEIDRLNEVAKNLNESLIDLQELGKYEQYIKWPWYIWLGFIAGLIAIVMVTIMLCCMTSCCSCLKGCCSCGSCCKFDEDDSEPVLKGVKLHYT

SEQ ID NO: 301 - protein, 12 aa, Artificial Sequence
  Synthetic MASC protein CDR3
AADPASPAFGDY

SEQ ID NO: 302 - protein, 12 aa, Artificial Sequence
  Synthetic MASC protein CDR3
AADPASPAWGDY

SEQ ID NO: 303 - protein, 12 aa, Artificial Sequence
  Synthetic MASC protein CDR3
AADPAVPAPGDY

SEQ ID NO: 304 - protein, 12 aa, Artificial Sequence
  Synthetic MASC protein CDR3
AADPAVPAYGDY

SEQ ID NO: 305 - protein, 12 aa, Artificial Sequence
  Synthetic MASC protein CDR3
AADPAVPAFGDY

SEQ ID NO: 306 - protein, 12 aa, Artificial Sequence
  Synthetic MASC protein CDR3
AADPAVPAWGDY

SEQ ID NO: 307 - protein, 12 aa, Artificial Sequence
  Synthetic MASC protein CDR3
AADPALPAPGDY

SEQ ID NO: 308 - protein, 12 aa, Artificial Sequence
  Synthetic MASC protein CDR3
AADPALPAYGDY

SEQ ID NO: 309 - protein, 12 aa, Artificial Sequence
  Synthetic MASC protein CDR3
AADPALPAFGDY

SEQ ID NO: 310 - protein, 12 aa, Artificial Sequence
  Synthetic MASC protein CDR3
AADPALPAWGDY

SEQ ID NO: 311 - protein, 12 aa, Artificial Sequence
  Synthetic MASC protein CDR3
AADPAIPAPGDY

SEQ ID NO: 312 - protein, 12 aa, Artificial Sequence
  Synthetic MASC protein CDR3
AADPAIPAYGDY

SEQ ID NO: 313 - protein, 12 aa, Artificial Sequence
  Synthetic MASC protein CDR3
AADPAIPAFGDY

SEQ ID NO: 314 - protein, 12 aa, Artificial Sequence
  Synthetic MASC protein CDR3
AADPAIPAWGDY

SEQ ID NO: 315 - protein, 12 aa, Artificial Sequence
  Synthetic MASC protein CDR3
AADPATPAPGDY

SEQ ID NO: 316 - protein, 12 aa, Artificial Sequence
  Synthetic MASC protein CDR3
AADPATPAYGDY

SEQ ID NO: 317 - protein, 12 aa, Artificial Sequence
  Synthetic MASC protein CDR3
AADPATPAFGDY

SEQ ID NO: 318 - protein, 12 aa, Artificial Sequence
  Synthetic MASC protein CDR3
AADPATPAWGDY

SEQ ID NO: 319 - protein, 12 aa, Artificial Sequence
  Synthetic MASC protein CDR3
AADPASPAPGDY

SEQ ID NO: 320 - protein, 12 aa, Artificial Sequence
  Synthetic MASC protein CDR3
AADPASPAYGDY

SEQ ID NO: 321 - protein, 12 aa, Artificial Sequence
  Synthetic MASC protein CDR3
AADPASPAFGDY

SEQ ID NO: 322 - protein, 12 aa, Artificial Sequence
  Synthetic MASC protein CDR3
AADPASPAWGDY

SEQ ID NO: 323 - protein, 12 aa, Artificial Sequence
  Synthetic MASC protein CDR3
AADPAVPAPGDY

SEQ ID NO: 324 - protein, 12 aa, Artificial Sequence
  Synthetic MASC protein CDR3
AADPAVPAYGDY

SEQ ID NO: 325 - protein, 12 aa, Artificial Sequence
  Synthetic MASC protein CDR3
AADPAVPAFGDY

SEQ ID NO: 326 - protein, 12 aa, Artificial Sequence
  Synthetic MASC protein CDR3
AADPAVPAWGDY

SEQ ID NO: 327 - protein, 12 aa, Artificial Sequence
  Synthetic MASC protein CDR3
AADPALPAPGDY

SEQ ID NO: 328 - protein, 12 aa, Artificial Sequence
  Synthetic MASC protein CDR3
AADPALPAYGDY

SEQ ID NO: 329 - protein, 12 aa, Artificial Sequence
  Synthetic MASC protein CDR3
AADPALPAFGDY

SEQ ID NO: 330 - protein, 12 aa, Artificial Sequence
  Synthetic MASC protein CDR3
AADPALPAWGDY

SEQ ID NO: 331 - protein, 12 aa, Artificial Sequence
  Synthetic MASC protein CDR3
AADPAIPAPGDY

SEQ ID NO: 332 - protein, 12 aa, Artificial Sequence
  Synthetic MASC protein CDR3
AADPAIPAYGDY

SEQ ID NO: 333 - protein, 12 aa, Artificial Sequence
  Synthetic MASC protein CDR3
AADPAIPAFGDY

SEQ ID NO: 334 - protein, 12 aa, Artificial Sequence
  Synthetic MASC protein CDR3
AADPAIPAWGDY

SEQ ID NO: 335 - protein, 12 aa, Artificial Sequence
  Synthetic MASC protein CDR3
AADPATPAPGDY

SEQ ID NO: 336 - protein, 12 aa, Artificial Sequence
  Synthetic MASC protein CDR3
AADPATPAYGDY

SEQ ID NO: 337 - protein, 12 aa, Artificial Sequence
  Synthetic MASC protein CDR3
AADPATPAFGDY

SEQ ID NO: 338 - protein, 12 aa, Artificial Sequence
  Synthetic MASC protein CDR3
AADPATPAWGDY

SEQ ID NO: 339 - protein, 12 aa, Artificial Sequence
  Synthetic MASC protein CDR3
AADPASPAPGDY

SEQ ID NO: 340 - protein, 12 aa, Artificial Sequence
  Synthetic MASC protein CDR3
AADPASPAYGDY

SEQ ID NO: 341 - protein, 12 aa, Artificial Sequence
  Synthetic MASC protein CDR3
AADPASPAFGDY

SEQ ID NO: 342 - protein, 12 aa, Artificial Sequence
  Synthetic MASC protein CDR3
AADPASPAWGDY

SEQ ID NO: 343 - protein, 12 aa, Artificial Sequence
  Synthetic MASC protein CDR3
AADPAVPAPGDY

SEQ ID NO: 344 - protein, 12 aa, Artificial Sequence
  Synthetic MASC protein CDR3
AADPAVPAYGDY

SEQ ID NO: 345 - protein, 12 aa, Artificial Sequence
  Synthetic MASC protein CDR3
AADPAVPAFGDY

SEQ ID NO: 346 - protein, 12 aa, Artificial Sequence
  Synthetic MASC protein CDR3
AADPAVPAWGDY

SEQ ID NO: 347 - protein, 12 aa, Artificial Sequence
  Synthetic MASC protein CDR3
AADPALPAPGDY

SEQ ID NO: 348 - protein, 12 aa, Artificial Sequence
  Synthetic MASC protein CDR3
AADPALPAYGDY

SEQ ID NO: 349 - protein, 12 aa, Artificial Sequence
  Synthetic MASC protein CDR3
AADPALPAFGDY

SEQ ID NO: 350 - protein, 12 aa, Artificial Sequence
  Synthetic MASC protein CDR3
AADPALPAWGDY

SEQ ID NO: 351 - protein, 12 aa, Artificial Sequence
  Synthetic MASC protein CDR3
AADPAIPAPGDY

SEQ ID NO: 352 - protein, 12 aa, Artificial Sequence
  Synthetic MASC protein CDR3
AADPAIPAYGDY

SEQ ID NO: 353 - protein, 12 aa, Artificial Sequence
  Synthetic MASC protein CDR3
AADPAIPAFGDY

SEQ ID NO: 354 - protein, 12 aa, Artificial Sequence
  Synthetic MASC protein CDR3
AADPAIPAWGDY

SEQ ID NO: 355 - protein, 12 aa, Artificial Sequence
  Synthetic MASC protein CDR3
AADPATPAPGDY

SEQ ID NO: 356 - protein, 12 aa, Artificial Sequence
  Synthetic MASC protein CDR3
AADPATPAYGDY

SEQ ID NO: 357 - protein, 12 aa, Artificial Sequence
  Synthetic MASC protein CDR3
AADPATPAFGDY

SEQ ID NO: 358 - protein, 12 aa, Artificial Sequence
  Synthetic MASC protein CDR3
AADPATPAWGDY

SEQ ID NO: 359 - protein, 12 aa, Artificial Sequence
  Synthetic MASC protein CDR3
AADPASPAPGDY

SEQ ID NO: 360 - protein, 12 aa, Artificial Sequence
  Synthetic MASC protein CDR3
AADPASPAYGDY

SEQ ID NO: 361 - protein, 12 aa, Artificial Sequence
  Synthetic MASC protein CDR3
AADPASPAFGDY

SEQ ID NO: 362 - protein, 12 aa, Artificial Sequence
  Synthetic MASC protein CDR3
AADPASPAWGDY

SEQ ID NO: 363 - protein, 12 aa, Artificial Sequence
  Synthetic MASC protein CDR3
AADPAVPAPGDY

SEQ ID NO: 364 - protein, 12 aa, Artificial Sequence
  Synthetic MASC protein CDR3
AADPAVPAYGDY

SEQ ID NO: 365 - protein, 12 aa, Artificial Sequence
  Synthetic MASC protein CDR3
AADPAVPAFGDY

SEQ ID NO: 366 - protein, 12 aa, Artificial Sequence
  Synthetic MASC protein CDR3
AADPAVPAWGDY

SEQ ID NO: 367 - protein, 12 aa, Artificial Sequence
  Synthetic MASC protein CDR3
AADPALPAPGDY

SEQ ID NO: 368 - protein, 12 aa, Artificial Sequence
  Synthetic MASC protein CDR3
AADPALPAYGDY

SEQ ID NO: 369 - protein, 12 aa, Artificial Sequence
  Synthetic MASC protein CDR3
AADPALPAFGDY

SEQ ID NO: 370 - protein, 12 aa, Artificial Sequence
  Synthetic MASC protein CDR3
AADPALPAWGDY

SEQ ID NO: 371 - protein, 12 aa, Artificial Sequence
  Synthetic MASC protein CDR3
AADPAIPAPGDY

SEQ ID NO: 372 - protein, 12 aa, Artificial Sequence
  Synthetic MASC protein CDR3
AADPAIPAYGDY

SEQ ID NO: 373 - protein, 12 aa, Artificial Sequence
  Synthetic MASC protein CDR3
AADPAIPAFGDY

SEQ ID NO: 374 - protein, 12 aa, Artificial Sequence
  Synthetic MASC protein CDR3
AADPAIPAWGDY

SEQ ID NO: 375 - protein, 12 aa, Artificial Sequence
  Synthetic MASC protein CDR3
AADPATPAPGDY

SEQ ID NO: 376 - protein, 12 aa, Artificial Sequence
  Synthetic MASC protein CDR3
AADPATPAYGDY

SEQ ID NO: 377 - protein, 12 aa, Artificial Sequence
  Synthetic MASC protein CDR3
AADPATPAFGDY

SEQ ID NO: 378 - protein, 12 aa, Artificial Sequence
  Synthetic MASC protein CDR3
AADPATPAWGDY

SEQ ID NO: 379 - protein, 12 aa, Artificial Sequence
  Synthetic MASC protein CDR3
AADPASPAPGDY

SEQ ID NO: 380 - protein, 12 aa, Artificial Sequence
  Synthetic MASC protein CDR3
AADPASPAYGDY

SEQ ID NO: 381 - protein, 12 aa, Artificial Sequence
  Synthetic MASC protein CDR3
AADPASPAFGDY

SEQ ID NO: 382 - protein, 12 aa, Artificial Sequence
  Synthetic MASC protein CDR3
AADPASPAWGDY

SEQ ID NO: 383 - protein, 12 aa, Artificial Sequence
  Synthetic MASC protein CDR3
AADPAVPAPGDY

SEQ ID NO: 384 - protein, 12 aa, Artificial Sequence
  Synthetic MASC protein CDR3
AADPAVPAYGDY

SEQ ID NO: 385 - protein, 12 aa, Artificial Sequence
  Synthetic MASC protein CDR3
AADPAVPAFGDY

SEQ ID NO: 386 - protein, 12 aa, Artificial Sequence
  Synthetic MASC protein CDR3
AADPAVPAWGDY

SEQ ID NO: 387 - protein, 12 aa, Artificial Sequence
  Synthetic MASC protein CDR3
AADPALPAPGDY

SEQ ID NO: 388 - protein, 12 aa, Artificial Sequence
  Synthetic MASC protein CDR3
AADPALPAYGDY

SEQ ID NO: 389 - protein, 12 aa, Artificial Sequence
  Synthetic MASC protein CDR3
AADPALPAFGDY

SEQ ID NO: 390 - protein, 12 aa, Artificial Sequence
  Synthetic MASC protein CDR3
AADPALPAWGDY

SEQ ID NO: 391 - protein, 12 aa, Artificial Sequence
  Synthetic MASC protein CDR3
AADPAIPAPGDY

SEQ ID NO: 392 - protein, 12 aa, Artificial Sequence
  Synthetic MASC protein CDR3
AADPAIPAYGDY

SEQ ID NO: 393 - protein, 12 aa, Artificial Sequence
  Synthetic MASC protein CDR3
AADPAIPAFGDY

SEQ ID NO: 394 - protein, 12 aa, Artificial Sequence
  Synthetic MASC protein CDR3
AADPAIPAWGDY

SEQ ID NO: 395 - protein, 12 aa, Artificial Sequence
  Synthetic MASC protein CDR3
AADPATPAPGDY

SEQ ID NO: 396 - protein, 12 aa, Artificial Sequence
  Synthetic MASC protein CDR3
AADPATPAYGDY

SEQ ID NO: 397 - protein, 8 aa, Artificial Sequence
  Synthetic MASC protein CDR2
TRRHSITY

SEQ ID NO: 398 - protein, 8 aa, Artificial Sequence
  Synthetic MASC protein CDR2
TRRYSITY

SEQ ID NO: 399 - protein, 8 aa, Artificial Sequence
  Synthetic MASC protein CDR2
TRRQSITY

SEQ ID NO: 400 - protein, 8 aa, Artificial Sequence
  Synthetic MASC protein CDR1
GFIFGRNA

SEQ ID NO: 401 - protein, 8 aa, Artificial Sequence
  Synthetic MASC protein CDR1
GLIFGRNA

SEQ ID NO: 402 - protein, 12 aa, Artificial Sequence
  Synthetic MASC protein CDR3
AADPATPAFGDY

SEQ ID NO: 403 - protein, 12 aa, Artificial Sequence
  Synthetic MASC protein CDR3
AADPATPAWGDY

SEQ ID NO: 404 - protein, 12 aa, Artificial Sequence
  Synthetic MASC protein CDR3
AADPASPAPGDY

SEQ ID NO: 405 - protein, 12 aa, Artificial Sequence
  Synthetic MASC protein CDR3
AADPASPAYGDY

SEQ ID NO: 406 - protein, 12 aa, Artificial Sequence
  Synthetic MASC protein CDR3
AADPASPAFGDY

SEQ ID NO: 407 - protein, 12 aa, Artificial Sequence
  Synthetic MASC protein CDR3
AADPASPAWGDY

SEQ ID NO: 408 - protein, 12 aa, Artificial Sequence
  Synthetic MASC protein CDR3
AADPAVPAPGDY

SEQ ID NO: 409 - protein, 12 aa, Artificial Sequence
  Synthetic MASC protein CDR3
AADPAVPAYGDY

SEQ ID NO: 410 - protein, 12 aa, Artificial Sequence
  Synthetic MASC protein CDR3
AADPAVPAFGDY

SEQ ID NO: 411 - protein, 12 aa, Artificial Sequence
  Synthetic MASC protein CDR3
AADPAVPAWGDY

SEQ ID NO: 412 - protein, 12 aa, Artificial Sequence
  Synthetic MASC protein CDR3
AADPALPAPGDY

SEQ ID NO: 413 - protein, 12 aa, Artificial Sequence
  Synthetic MASC protein CDR3
AADPALPAYGDY

SEQ ID NO: 414 - protein, 12 aa, Artificial Sequence
  Synthetic MASC protein CDR3
AADPALPAFGDY

SEQ ID NO: 415 - protein, 12 aa, Artificial Sequence
  Synthetic MASC protein CDR3
AADPALPAWGDY

SEQ ID NO: 416 - protein, 12 aa, Artificial Sequence
  Synthetic MASC protein CDR3
AADPAIPAPGDY

SEQ ID NO: 417 - protein, 12 aa, Artificial Sequence
  Synthetic MASC protein CDR3
AADPAIPAYGDY

SEQ ID NO: 418 - protein, 12 aa, Artificial Sequence
  Synthetic MASC protein CDR3
AADPAIPAFGDY

SEQ ID NO: 419 - protein, 12 aa, Artificial Sequence
  Synthetic MASC protein CDR3
AADPAIPAWGDY

SEQ ID NO: 420 - protein, 12 aa, Artificial Sequence
  Synthetic MASC protein CDR3
AADPATPAPGDY

SEQ ID NO: 421 - protein, 12 aa, Artificial Sequence
  Synthetic MASC protein CDR3
AADPATPAYGDY

SEQ ID NO: 422 - protein, 12 aa, Artificial Sequence
  Synthetic MASC protein CDR3
AADPATPAFGDY

SEQ ID NO: 423 - protein, 12 aa, Artificial Sequence
  Synthetic MASC protein CDR3
AADPASPAPGDY

SEQ ID NO: 424 - protein, 12 aa, Artificial Sequence
  Synthetic MASC protein CDR3
AADPASPAYGDY

SEQ ID NO: 425 - protein, 12 aa, Artificial Sequence
  Synthetic MASC protein CDR3
AADPASPAFGDY

SEQ ID NO: 426 - protein, 12 aa, Artificial Sequence
  Synthetic MASC protein CDR3
AADPASPAWGDY

SEQ ID NO: 427 - protein, 12 aa, Artificial Sequence
  Synthetic MASC protein CDR3
AADPAVPAPGDY

SEQ ID NO: 428 - protein, 12 aa, Artificial Sequence
  Synthetic MASC protein CDR3
AADPAVPAYGDY

SEQ ID NO: 429 - protein, 12 aa, Artificial Sequence
  Synthetic MASC protein CDR3
AADPAVPAFGDY

SEQ ID NO: 430 - protein, 12 aa, Artificial Sequence
  Synthetic MASC protein CDR3
AADPAVPAWGDY

SEQ ID NO: 431 - protein, 12 aa, Artificial Sequence
  Synthetic MASC protein CDR3
AADPALPAPGDY

SEQ ID NO: 432 - protein, 12 aa, Artificial Sequence
  Synthetic MASC protein CDR3
AADPALPAYGDY

SEQ ID NO: 433 - protein, 12 aa, Artificial Sequence
  Synthetic MASC protein CDR3
AADPALPAFGDY

SEQ ID NO: 434 - protein, 12 aa, Artificial Sequence
  Synthetic MASC protein CDR3
AADPALPAWGDY

SEQ ID NO: 435 - protein, 12 aa, Artificial Sequence
  Synthetic MASC protein CDR3
AADPAIPAPGDY

SEQ ID NO: 436 - protein, 12 aa, Artificial Sequence
  Synthetic MASC protein CDR3
AADPAIPAYGDY

SEQ ID NO: 437 - protein, 12 aa, Artificial Sequence
  Synthetic MASC protein CDR3
AADPAIPAFGDY

SEQ ID NO: 438 - protein, 12 aa, Artificial Sequence
  Synthetic MASC protein CDR3
AADPAIPAWGDY

SEQ ID NO: 439 - protein, 12 aa, Artificial Sequence
  Synthetic MASC protein CDR3
AADPATPAPGDY

SEQ ID NO: 440 - protein, 12 aa, Artificial Sequence
  Synthetic MASC protein CDR3
AADPATPAYGDY

SEQ ID NO: 441 - protein, 12 aa, Artificial Sequence
  Synthetic MASC protein CDR3
AADPATPAFGDY

SEQ ID NO: 442 - protein, 12 aa, Artificial Sequence
  Synthetic MASC protein CDR3
AADPATPAWGDY

SEQ ID NO: 443 - protein, 12 aa, Artificial Sequence
  Synthetic MASC protein CDR3
AADPASPAPGDY

SEQ ID NO: 444 - protein, 12 aa, Artificial Sequence
  Synthetic MASC protein CDR3
AADPASPAYGDY

SEQ ID NO: 445 - protein, 12 aa, Artificial Sequence
  Synthetic MASC protein CDR3
AADPASPAFGDY

SEQ ID NO: 446 - protein, 12 aa, Artificial Sequence
  Synthetic MASC protein CDR3
AADPASPAWGDY

SEQ ID NO: 447 - protein, 12 aa, Artificial Sequence
  Synthetic MASC protein CDR3
AADPAVPAPGDY

SEQ ID NO: 448 - protein, 12 aa, Artificial Sequence
  Synthetic MASC protein CDR3
AADPAVPAYGDY

SEQ ID NO: 449 - protein, 12 aa, Artificial Sequence
  Synthetic MASC protein CDR3
AADPAVPAFGDY

SEQ ID NO: 450 - protein, 12 aa, Artificial Sequence
  Synthetic MASC protein CDR3
AADPAVPAWGDY

SEQ ID NO: 451 - protein, 12 aa, Artificial Sequence
  Synthetic MASC protein CDR3
AADPALPAPGDY

SEQ ID NO: 452 - protein, 12 aa, Artificial Sequence
  Synthetic MASC protein CDR3
AADPALPAYGDY

SEQ ID NO: 453 - protein, 12 aa, Artificial Sequence
  Synthetic MASC protein CDR3
AADPALPAFGDY

SEQ ID NO: 454 - protein, 12 aa, Artificial Sequence
  Synthetic MASC protein CDR3
AADPALPAWGDY

SEQ ID NO: 455 - protein, 12 aa, Artificial Sequence
  Synthetic MASC protein CDR3
AADPAIPAPGDY

SEQ ID NO: 456 - protein, 12 aa, Artificial Sequence
  Synthetic MASC protein CDR3
AADPAIPAYGDY

SEQ ID NO: 457 - protein, 12 aa, Artificial Sequence
  Synthetic MASC protein CDR3
AADPAIPAFGDY

SEQ ID NO: 458 - protein, 12 aa, Artificial Sequence
  Synthetic MASC protein CDR3
AADPAIPAWGDY

SEQ ID NO: 459 - protein, 12 aa, Artificial Sequence
  Synthetic MASC protein CDR3
AADPATPAPGDY

SEQ ID NO: 460 - protein, 12 aa, Artificial Sequence
  Synthetic MASC protein CDR3
AADPATPAYGDY

SEQ ID NO: 461 - protein, 12 aa, Artificial Sequence
  Synthetic MASC protein CDR3
AADPATPAFGDY

SEQ ID NO: 462 - protein, 12 aa, Artificial Sequence
  Synthetic MASC protein CDR3
AADPATPAWGDY

SEQ ID NO: 463 - protein, 12 aa, Artificial Sequence
  Synthetic MASC protein CDR3
AADPASPAPGDY

SEQ ID NO: 464 - protein, 12 aa, Artificial Sequence
  Synthetic MASC protein CDR3
AADPASPAYGDY

SEQ ID NO: 465 - protein, 12 aa, Artificial Sequence
  Synthetic MASC protein CDR3
AADPASPAFGDY

SEQ ID NO: 466 - protein, 12 aa, Artificial Sequence
  Synthetic MASC protein CDR3
AADPASPAWGDY

SEQ ID NO: 467 - protein, 12 aa, Artificial Sequence
  Synthetic MASC protein CDR3
AADPAVPAPGDY

SEQ ID NO: 468 - protein, 12 aa, Artificial Sequence
  Synthetic MASC protein CDR3
AADPAVPAYGDY

SEQ ID NO: 469 - protein, 12 aa, Artificial Sequence
  Synthetic MASC protein CDR3
AADPAVPAFGDY

SEQ ID NO: 470 - protein, 12 aa, Artificial Sequence
  Synthetic MASC protein CDR3
AADPAVPAWGDY

SEQ ID NO: 471 - protein, 12 aa, Artificial Sequence
  Synthetic MASC protein CDR3
AADPALPAPGDY

SEQ ID NO: 472 - protein, 12 aa, Artificial Sequence
  Synthetic MASC protein CDR3
AADPALPAYGDY

SEQ ID NO: 473 - protein, 12 aa, Artificial Sequence
  Synthetic MASC protein CDR3
AADPALPAFGDY

SEQ ID NO: 474 - protein, 12 aa, Artificial Sequence
  Synthetic MASC protein CDR3
AADPALPAWGDY

SEQ ID NO: 475 - protein, 12 aa, Artificial Sequence
  Synthetic MASC protein CDR3
AADPAIPAPGDY

SEQ ID NO: 476 - protein, 12 aa, Artificial Sequence
  Synthetic MASC protein CDR3
AADPAIPAYGDY

SEQ ID NO: 477 - protein, 12 aa, Artificial Sequence
  Synthetic MASC protein CDR3
AADPAIPAFGDY

SEQ ID NO: 478 - protein, 12 aa, Artificial Sequence
  Synthetic MASC protein CDR3
AADPAIPAWGDY

SEQ ID NO: 479 - protein, 12 aa, Artificial Sequence
  Synthetic MASC protein CDR3
AADPATPAPGDY

SEQ ID NO: 480 - protein, 12 aa, Artificial Sequence
  Synthetic MASC protein CDR3
AADPATPAYGDY

SEQ ID NO: 481 - protein, 12 aa, Artificial Sequence
  Synthetic MASC protein CDR3
AADPATPAFGDY

SEQ ID NO: 482 - protein, 12 aa, Artificial Sequence
  Synthetic MASC protein CDR3
AADPATPAWGDY

SEQ ID NO: 483 - protein, 12 aa, Artificial Sequence
  Synthetic MASC protein CDR3
AADPASPAPGDY

SEQ ID NO: 484 - protein, 12 aa, Artificial Sequence
  Synthetic MASC protein CDR3
AADPASPAYGDY

SEQ ID NO: 485 - protein, 12 aa, Artificial Sequence
  Synthetic MASC protein CDR3
AADPASPAFGDY

SEQ ID NO: 486 - protein, 12 aa, Artificial Sequence
  Synthetic MASC protein CDR3
AADPASPAWGDY

SEQ ID NO: 487 - protein, 12 aa, Artificial Sequence
  Synthetic MASC protein CDR3
AADPAVPAPGDY

SEQ ID NO: 488 - protein, 12 aa, Artificial Sequence
  Synthetic MASC protein CDR3
AADPAVPAYGDY

SEQ ID NO: 489 - protein, 12 aa, Artificial Sequence
  Synthetic MASC protein CDR3
AADPAVPAFGDY

SEQ ID NO: 490 - protein, 12 aa, Artificial Sequence
  Synthetic MASC protein CDR3
AADPAVPAWGDY

SEQ ID NO: 491 - protein, 12 aa, Artificial Sequence
  Synthetic MASC protein CDR3
AADPALPAPGDY

SEQ ID NO: 492 - protein, 12 aa, Artificial Sequence
  Synthetic MASC protein CDR3
AADPALPAYGDY

SEQ ID NO: 493 - protein, 12 aa, Artificial Sequence
  Synthetic MASC protein CDR3
AADPALPAFGDY

SEQ ID NO: 494 - protein, 12 aa, Artificial Sequence
  Synthetic MASC protein CDR3
AADPALPAWGDY

SEQ ID NO: 495 - protein, 12 aa, Artificial Sequence
  Synthetic MASC protein CDR3
AADPAIPAPGDY

SEQ ID NO: 496 - protein, 12 aa, Artificial Sequence
  Synthetic MASC protein CDR3
AADPAIPAYGDY

SEQ ID NO: 497 - protein, 12 aa, Artificial Sequence
  Synthetic MASC protein CDR3
AADPAIPAFGDY

SEQ ID NO: 498 - protein, 12 aa, Artificial Sequence
  Synthetic MASC protein CDR3
AADPAIPAWGDY

SEQ ID NO: 499 - protein, 12 aa, Artificial Sequence
  Synthetic MASC protein CDR3
AADPATPAPGDY

SEQ ID NO: 500 - protein, 12 aa, Artificial Sequence
  Synthetic MASC protein CDR3
AADPATPAYGDY

SEQ ID NO: 501 - protein, 12 aa, Artificial Sequence
  Synthetic MASC protein CDR3
AADPATPAFGDY

SEQ ID NO: 502 - protein, 12 aa, Artificial Sequence
  Synthetic MASC protein CDR3
AADPATPAWGDY

SEQ ID NO: 503 - protein, 12 aa, Artificial Sequence
  Synthetic MASC protein CDR3
AADPASPAPGDY

SEQ ID NO: 504 - protein, 12 aa, Artificial Sequence
  Synthetic MASC protein CDR3
AADPASPAYGDY

SEQ ID NO: 505 - protein, 12 aa, Artificial Sequence
  Synthetic MASC protein CDR3
AADPASPAFGDY

SEQ ID NO: 506 - protein, 12 aa, Artificial Sequence
  Synthetic MASC protein CDR3
AADPASPAWGDY

SEQ ID NO: 507 - protein, 12 aa, Artificial Sequence
  Synthetic MASC protein CDR3
AADPAVPAPGDY

SEQ ID NO: 508 - protein, 12 aa, Artificial Sequence
  Synthetic MASC protein CDR3
AADPAVPAYGDY

SEQ ID NO: 509 - protein, 12 aa, Artificial Sequence
  Synthetic MASC protein CDR3
AADPAVPAFGDY

SEQ ID NO: 510 - protein, 12 aa, Artificial Sequence
  Synthetic MASC protein CDR3
AADPAVPAWGDY

SEQ ID NO: 511 - protein, 12 aa, Artificial Sequence
  Synthetic MASC protein CDR3
AADPALPAPGDY

SEQ ID NO: 512 - protein, 12 aa, Artificial Sequence
  Synthetic MASC protein CDR3
AADPALPAYGDY

SEQ ID NO: 513 - protein, 12 aa, Artificial Sequence
  Synthetic MASC protein CDR3
AADPALPAFGDY

SEQ ID NO: 514 - protein, 12 aa, Artificial Sequence
  Synthetic MASC protein CDR3
AADPALPAWGDY

SEQ ID NO: 515 - protein, 12 aa, Artificial Sequence
  Synthetic MASC protein CDR3
AADPAIPAPGDY

SEQ ID NO: 516 - protein, 12 aa, Artificial Sequence
  Synthetic MASC protein CDR3
AADPAIPAYGDY

SEQ ID NO: 517 - protein, 12 aa, Artificial Sequence
  Synthetic MASC protein CDR3
AADPAIPAFGDY

SEQ ID NO: 518 - protein, 12 aa, Artificial Sequence
  Synthetic MASC protein CDR3
AADPAIPAWGDY

SEQ ID NO: 519 - protein, 12 aa, Artificial Sequence
  Synthetic MASC protein CDR3
AADPATPAPGDY

SEQ ID NO: 520 - protein, 12 aa, Artificial Sequence
  Synthetic MASC protein CDR3
AADPATPAYGDY

SEQ ID NO: 521 - protein, 12 aa, Artificial Sequence
  Synthetic MASC protein CDR3
AADPATPAFGDY

SEQ ID NO: 522 - protein, 12 aa, Artificial Sequence
  Synthetic MASC protein CDR3
AADPATPAWGDY

SEQ ID NO: 523 - protein, 12 aa, Artificial Sequence
  Synthetic MASC protein CDR3
AADPASPAPGDY

SEQ ID NO: 524 - protein, 12 aa, Artificial Sequence
  Synthetic MASC protein CDR3
AADPASPAYGDY

SEQ ID NO: 525 - protein, 12 aa, Artificial Sequence
  Synthetic MASC protein CDR3
AADPASPAFGDY

SEQ ID NO: 526 - protein, 12 aa, Artificial Sequence
  Synthetic MASC protein CDR3
AADPASPAWGDY

SEQ ID NO: 527 - protein, 12 aa, Artificial Sequence
  Synthetic MASC protein CDR3
AADPAVPAPGDY

SEQ ID NO: 528 - protein, 12 aa, Artificial Sequence
  Synthetic MASC protein CDR3
AADPAVPAYGDY

SEQ ID NO: 529 - protein, 12 aa, Artificial Sequence
  Synthetic MASC protein CDR3
AADPAVPAFGDY

SEQ ID NO: 530 - protein, 12 aa, Artificial Sequence
  Synthetic MASC protein CDR3
AADPAVPAWGDY

SEQ ID NO: 531 - protein, 12 aa, Artificial Sequence
  Synthetic MASC protein CDR3
AADPALPAPGDY

SEQ ID NO: 532 - protein, 12 aa, Artificial Sequence
  Synthetic MASC protein CDR3
AADPALPAYGDY

SEQ ID NO: 533 - protein, 12 aa, Artificial Sequence
  Synthetic MASC protein CDR3
AADPALPAFGDY

SEQ ID NO: 534 - protein, 12 aa, Artificial Sequence
  Synthetic MASC protein CDR3
AADPALPAWGDY

SEQ ID NO: 535 - protein, 12 aa, Artificial Sequence
  Synthetic MASC protein CDR3
AADPAIPAPGDY

SEQ ID NO: 536 - protein, 12 aa, Artificial Sequence
  Synthetic MASC protein CDR3
AADPAIPAYGDY

SEQ ID NO: 537 - protein, 12 aa, Artificial Sequence
  Synthetic MASC protein CDR3
AADPAIPAFGDY

SEQ ID NO: 538 - protein, 12 aa, Artificial Sequence
  Synthetic MASC protein CDR3
AADPAIPAWGDY

SEQ ID NO: 539 - protein, 12 aa, Artificial Sequence
  Synthetic MASC protein CDR3
AADPATPAPGDY

SEQ ID NO: 540 - protein, 12 aa, Artificial Sequence
  Synthetic MASC protein CDR3
AADPATPAYGDY

SEQ ID NO: 541 - protein, 12 aa, Artificial Sequence
  Synthetic MASC protein CDR3
AADPATPAFGDY

SEQ ID NO: 542 - protein, 12 aa, Artificial Sequence
  Synthetic MASC protein CDR3
AADPATPAWGDY

SEQ ID NO: 543 - protein, 12 aa, Artificial Sequence
  Synthetic MASC protein CDR3
AADPASPAPGDY

SEQ ID NO: 544 - protein, 12 aa, Artificial Sequence
  Synthetic MASC protein CDR3
AADPASPAYGDY

SEQ ID NO: 545 - protein, 12 aa, Artificial Sequence
  Synthetic MASC protein CDR3
AADPASPAFGDY

SEQ ID NO: 546 - protein, 12 aa, Artificial Sequence
  Synthetic MASC protein CDR3
AADPASPAWGDY

SEQ ID NO: 547 - protein, 12 aa, Artificial Sequence
  Synthetic MASC protein CDR3
AADPAVPAPGDY

SEQ ID NO: 548 - protein, 12 aa, Artificial Sequence
  Synthetic MASC protein CDR3
AADPAVPAYGDY

SEQ ID NO: 549 - protein, 12 aa, Artificial Sequence
  Synthetic MASC protein CDR3
AADPAVPAFGDY

SEQ ID NO: 550 - protein, 12 aa, Artificial Sequence
  Synthetic MASC protein CDR3
AADPAVPAWGDY

SEQ ID NO: 551 - protein, 12 aa, Artificial Sequence
  Synthetic MASC protein CDR3
AADPALPAPGDY

SEQ ID NO: 552 - protein, 12 aa, Artificial Sequence
  Synthetic MASC protein CDR3
AADPALPAYGDY

SEQ ID NO: 553 - protein, 12 aa, Artificial Sequence
  Synthetic MASC protein CDR3
AADPALPAFGDY

SEQ ID NO: 554 - protein, 12 aa, Artificial Sequence
  Synthetic MASC protein CDR3
AADPALPAWGDY

SEQ ID NO: 555 - protein, 12 aa, Artificial Sequence
  Synthetic MASC protein CDR3
AADPAIPAPGDY

SEQ ID NO: 556 - protein, 12 aa, Artificial Sequence
  Synthetic MASC protein CDR3
AADPAIPAYGDY

SEQ ID NO: 557 - protein, 12 aa, Artificial Sequence
  Synthetic MASC protein CDR3
AADPAIPAFGDY

SEQ ID NO: 558 - protein, 12 aa, Artificial Sequence
  Synthetic MASC protein CDR3
AADPAIPAWGDY

SEQ ID NO: 559 - protein, 12 aa, Artificial Sequence
  Synthetic MASC protein CDR3
AADPATPAPGDY

SEQ ID NO: 560 - protein, 12 aa, Artificial Sequence
  Synthetic MASC protein CDR3
AADPATPAYGDY

SEQ ID NO: 561 - protein, 12 aa, Artificial Sequence
  Synthetic MASC protein CDR3
AADPATPAFGDY

SEQ ID NO: 562 - protein, 12 aa, Artificial Sequence
  Synthetic MASC protein CDR3
AADPATPAWGDY

SEQ ID NO: 563 - protein, 12 aa, Artificial Sequence
  Synthetic MASC protein CDR3
AADPASPAPGDY

SEQ ID NO: 564 - protein, 12 aa, Artificial Sequence
  Synthetic MASC protein CDR3
AADPASPAYGDY

SEQ ID NO: 565 - protein, 12 aa, Artificial Sequence
  Synthetic MASC protein CDR3
AADPASPAFGDY

SEQ ID NO: 566 - protein, 12 aa, Artificial Sequence
  Synthetic MASC protein CDR3
AADPASPAWGDY

SEQ ID NO: 567 - protein, 12 aa, Artificial Sequence
  Synthetic MASC protein CDR3
AADPAVPAPGDY

SEQ ID NO: 568 - protein, 12 aa, Artificial Sequence
  Synthetic MASC protein CDR3
AADPAVPAYGDY

SEQ ID NO: 569 - protein, 12 aa, Artificial Sequence
  Synthetic MASC protein CDR3
AADPAVPAFGDY

SEQ ID NO: 570 - protein, 12 aa, Artificial Sequence
  Synthetic MASC protein CDR3
AADPAVPAWGDY

SEQ ID NO: 571 - protein, 12 aa, Artificial Sequence
  Synthetic MASC protein CDR3
AADPALPAPGDY

SEQ ID NO: 572 - protein, 12 aa, Artificial Sequence
  Synthetic MASC protein CDR3
AADPALPAYGDY

SEQ ID NO: 573 - protein, 12 aa, Artificial Sequence
  Synthetic MASC protein CDR3
AADPALPAFGDY

SEQ ID NO: 574 - protein, 12 aa, Artificial Sequence
  Synthetic MASC protein CDR3
AADPALPAWGDY

SEQ ID NO: 575 - protein, 12 aa, Artificial Sequence
  Synthetic MASC protein CDR3
AADPAIPAPGDY

SEQ ID NO: 576 - protein, 12 aa, Artificial Sequence
  Synthetic MASC protein CDR3
AADPAIPAYGDY

SEQ ID NO: 577 - protein, 12 aa, Artificial Sequence
  Synthetic MASC protein CDR3
AADPAIPAFGDY

SEQ ID NO: 578 - protein, 12 aa, Artificial Sequence
  Synthetic MASC protein CDR3
AADPAIPAWGDY

SEQ ID NO: 579 - protein, 12 aa, Artificial Sequence
  Synthetic MASC protein CDR3
AADPATPAPGDY

SEQ ID NO: 580 - protein, 12 aa, Artificial Sequence
  Synthetic MASC protein CDR3
AADPATPAYGDY

SEQ ID NO: 581 - protein, 12 aa, Artificial Sequence
  Synthetic MASC protein CDR3
AADPATPAFGDY

SEQ ID NO: 582 - protein, 12 aa, Artificial Sequence
  Synthetic MASC protein CDR3
AADPATPAWGDY

SEQ ID NO: 583 - protein, 1785 aa, Artificial Sequence
  Synthetic sdABD sequence of MASC monomer
QVQLVESGGGLVQAGGSLRLSCAASGIIFGRNAMGWYRQAPGKERELVAGITRRGSITYYADSVKGRFTISRDNAKNTVYLQMNSLKPEDTAVYYCAADPASPAPGDYWGQGTQVTVSSQVQLVESGGGLVQAGGSLRLSCAASGIIFGRNAMGWYRQAPGKERELVAGITRRGSITYYADSVKGRFTISRDNAKNTVYLQMNSLKPEDTAVYYCAADPASPAYGDYWGQGTQVTVSSQVQLVESGGGLVQAGGSLRLSCAASGIIFGRNAMGWYRQAPGKERELVAGITRRGSITYYADSVKGRFTISRDNAKNTVYLQMNSLKPEDTAVYYCAADPASPAFGDYWGQGTQVTVSSQVQLVESGGGLVQAGGSLRLSCAASGIIFGRNAMGWYRQAPGKERELVAGITRRGSITYYADSVKGRFTISRDNAKNTVYLQMNSLKPEDTAVYYCAADPASPAWGDYWGQGTQVTVSSQVQLVESGGGLVQAGGSLRLSCAASGIIFGRNAMGWYRQAPGKERELVAGITRRGSITYYADSVKGRFTISRDNAKNTVYLQMNSLKPEDTAVYYCAADPAVPAPGDYWGQGTQVTVSSQVQLVESGGGLVQAGGSLRLSCAASGIIFGRNAMGWYRQAPGKERELVAGITRRGSITYYADSVKGRFTISRDNAKNTVYLQMNSLKPEDTAVYYCAADPAVPAYGDYWGQGTQVTVSSQVQLVESGGGLVQAGGSLRLSCAASGIIFGRNAMGWYRQAPGKERELVAGITRRGSITYYADSVKGRFTISRDNAKNTVYLQMNSLKPEDTAVYYCAADPAVPAFGDYWGQGTQVTVSSQVQLVESGGGLVQAGGSLRLSCAASGIIFGRNAMGWYRQAPGKERELVAGITRRGSITYYADSVKGRFTISRDNAKNTVYLQMNSLKPEDTAVYYCAADPAVPAWGDYWGQGTQVTVSSQVQLVESGGGLVQAGGSLRLSCAASGIIFGRNAMGWYRQAPGKERELVAGITRRGSITYYADSVKGRFTISRDNAKNTVYLQMNSLKPEDTAVYYCAADPALPAPGDYWGQGTQVTVSSQVQLVESGGGLVQAGGSLRLSCAASGIIFGRNAMGWYRQAPGKERELVAGITRRGSITYYADSVKGRFTISRDNAKNTVYLQMNSLKPEDTAVYYCAADPALPAYGDYWGQGTQVTVSSQVQLVESGGGLVQAGGSLRLSCAASGIIFGRNAMGWYRQAPGKERELVAGITRRGSITYYADSVKGRFTISRDNAKNTVYLQMNSLKPEDTAVYYCAADPALPAFGDYWGQGTQVTVSSQVQLVESGGGLVQAGGSLRLSCAASGIIFGRNAMGWYRQAPGKERELVAGITRRGSITYYADSVKGRFTISRDNAKNTVYLQMNSLKPEDTAVYYCAADPALPAWGDYWGQGTQVTVSSQVQLVESGGGLVQAGGSLRLSCAASGIIFGRNAMGWYRQAPGKERELVAGITRRGSITYYADSVKGRFTISRDNAKNTVYLQMNSLKPEDTAVYYCAADPAIPAPGDYWGQGTQVTVSSQVQLVESGGGLVQAGGSLRLSCAASGIIFGRNAMGWYRQAPGKERELVAGITRRGSITYYADSVKGRFTISRDNAKNTVYLQMNSLKPEDTAVYYCAADPAIPAYGDYWGQGTQVTVSSQVQLVESGGGLVQAGGSLRLSCAASGIIFGRNAMGWYRQAPGKERELVAGITRRGSITYYADSVKGRFTISRDNAKNTVYLQMNSLKPEDTAVYYCAADPAIPAFGDYWGQGTQVTVSS

SEQ ID NO: 584 - protein, 1904 aa, Artificial Sequence
  Synthetic sdABD sequence of MASC monomer
QVQLVESGGGLVQAGGSLRLSCAASGIIFGRNAMGWYRQAPGKERELVAGITRRGSITYYADSVKGRFTISRDNAKNTVYLQMNSLKPEDTAVYYCAADPAIPAWGDYWGQGTQVTVSSQVQLVESGGGLVQAGGSLRLSCAASGIIFGRNAMGWYRQAPGKERELVAGITRRGSITYYADSVKGRFTISRDNAKNTVYLQMNSLKPEDTAVYYCAADPATPAPGDYWGQGTQVTVSSQVQLVESGGGLVQAGGSLRLSCAASGIIFGRNAMGWYRQAPGKERELVAGITRRGSITYYADSVKGRFTISRDNAKNTVYLQMNSLKPEDTAVYYCAADPATPAYGDYWGQGTQVTVSSQVQLVESGGGLVQAGGSLRLSCAASGIIFGRNAMGWYRQAPGKERELVAGITRRGSITYYADSVKGRFTISRDNAKNTVYLQMNSLKPEDTAVYYCAADPATPAFGDYWGQGTQVTVSSQVQLVESGGGLVQAGGSLRLSCAASGIIFGRNAMGWYRQAPGKERELVAGITRRGSITYYADSVKGRFTISRDNAKNTVYLQMNSLKPEDTAVYYCAADPATPAWGDYWGQGTQVTVSSQVQLVESGGGLVQAGGSLRLSCAASGIIFGRNAMGWYRQAPGKERELVAGITRRHSITYYADSVKGRFTISRDNAKNTVYLQMNSLKPEDTAVYYCAADPASPAPGDYWGQGTQVTVSSQVQLVESGGGLVQAGGSLRLSCAASGIIFGRNAMGWYRQAPGKERELVAGITRRHSITYYADSVKGRFTISRDNAKNTVYLQMNSLKPEDTAVYYCAADPASPAYGDYWGQGTQVTVSSQVQLVESGGGLVQAGGSLRLSCAASGIIFGRNAMGWYRQAPGKERELVAGITRRHSITYYADSVKGRFTISRDNAKNTVYLQMNSLKPEDTAVYYCAADPASPAFGDYWGQGTQVTVSSQVQLVESGGGLVQAGGSLRLSCAASGIIFGRNAMGWYRQAPGKERELVAGITRRHSITYYADSVKGRFTISRDNAKNTVYLQMNSLKPEDTAVYYCAADPASPAWGDYWGQGTQVTVSSQVQLVESGGGLVQAGGSLRLSCAASGIIFGRNAMGWYRQAPGKERELVAGITRRHSITYYADSVKGRFTISRDNAKNTVYLQMNSLKPEDTAVYYCAADPAVPAPGDYWGQGTQVTVSSQVQLVESGGGLVQAGGSLRLSCAASGIIFGRNAMGWYRQAPGKERELVAGITRRHSITYYADSVKGRFTISRDNAKNTVYLQMNSLKPEDTAVYYCAADPAVPAYGDYWGQGTQVTVSSQVQLVESGGGLVQAGGSLRLSCAASGIIFGRNAMGWYRQAPGKERELVAGITRRHSITYYADSVKGRFTISRDNAKNTVYLQMNSLKPEDTAVYYCAADPAVPAFGDYWGQGTQVTVSSQVQLVESGGGLVQAGGSLRLSCAASGIIFGRNAMGWYRQAPGKERELVAGITRRHSITYYADSVKGRFTISRDNAKNTVYLQMNSLKPEDTAVYYCAADPAVPAWGDYWGQGTQVTVSSQVQLVESGGGLVQAGGSLRLSCAASGIIFGRNAMGWYRQAPGKERELVAGITRRHSITYYADSVKGRFTISRDNAKNTVYLQMNSLKPEDTAVYYCAADPALPAPGDYWGQGTQVTVSSQVQLVESGGGLVQAGGSLRLSCAASGIIFGRNAMGWYRQAPGKERELVAGITRRHSITYYADSVKGRFTISRDNAKNTVYLQMNSLKPEDTAVYYCAADPALPAYGDYWGQGTQVTVSSQVQLVESGGGLVQAGGSLRLSCAASGIIFGRNAMGWYRQAPGKERELVAGITRRHSITYYADSVKGRFTISRDNAKNTVYLQMNSLKPEDTAVYYCAADPALPAFGDYWGQGTQVTVSS

SEQ ID NO: 585 - protein, 1904 aa, Artificial Sequence
  Synthetic sdABD sequence of MASC monomer
QVQLVESGGGLVQAGGSLRLSCAASGIIFGRNAMGWYRQAPGKERELVAGITRRHSITYYADSVKGRFTISRDNAKNTVYLQMNSLKPEDTAVYYCAADPALPAWGDYWGQGTQVTVSSQVQLVESGGGLVQAGGSLRLSCAASGIIFGRNAMGWYRQAPGKERELVAGITRRHSITYYADSVKGRFTISRDNAKNTVYLQMNSLKPEDTAVYYCAADPAIPAPGDYWGQGTQVTVSSQVQLVESGGGLVQAGGSLRLSCAASGIIFGRNAMGWYRQAPGKERELVAGITRRHSITYYADSVKGRFTISRDNAKNTVYLQMNSLKPEDTAVYYCAADPAIPAYGDYWGQGTQVTVSSQVQLVESGGGLVQAGGSLRLSCAASGIIFGRNAMGWYRQAPGKERELVAGITRRHSITYYADSVKGRFTISRDNAKNTVYLQMNSLKPEDTAVYYCAADPAIPAFGDYWGQGTQVTVSSQVQLVESGGGLVQAGGSLRLSCAASGIIFGRNAMGWYRQAPGKERELVAGITRRHSITYYADSVKGRFTISRDNAKNTVYLQMNSLKPEDTAVYYCAADPAIPAWGDYWGQGTQVTVSSQVQLVESGGGLVQAGGSLRLSCAASGIIFGRNAMGWYRQAPGKERELVAGITRRHSITYYADSVKGRFTISRDNAKNTVYLQMNSLKPEDTAVYYCAADPATPAPGDYWGQGTQVTVSSQVQLVESGGGLVQAGGSLRLSCAASGIIFGRNAMGWYRQAPGKERELVAGITRRHSITYYADSVKGRFTISRDNAKNTVYLQMNSLKPEDTAVYYCAADPATPAYGDYWGQGTQVTVSSQVQLVESGGGLVQAGGSLRLSCAASGIIFGRNAMGWYRQAPGKERELVAGITRRHSITYYADSVKGRFTISRDNAKNTVYLQMNSLKPEDTAVYYCAADPATPAFGDYWGQGTQVTVSSQVQLVESGGGLVQAGGSLRLSCAASGIIFGRNAMGWYRQAPGKERELVAGITRRHSITYYADSVKGRFTISRDNAKNTVYLQMNSLKPEDTAVYYCAADPATPAWGDYWGQGTQVTVSSQVQLVESGGGLVQAGGSLRLSCAASGIIFGRNAMGWYRQAPGKERELVAGITRRYSITYYADSVKGRFTISRDNAKNTVYLQMNSLKPEDTAVYYCAADPASPAPGDYWGQGTQVTVSSQVQLVESGGGLVQAGGSLRLSCAASGIIFGRNAMGWYRQAPGKERELVAGITRRYSITYYADSVKGRFTISRDNAKNTVYLQMNSLKPEDTAVYYCAADPASPAYGDYWGQGTQVTVSSQVQLVESGGGLVQAGGSLRLSCAASGIIFGRNAMGWYRQAPGKERELVAGITRRYSITYYADSVKGRFTISRDNAKNTVYLQMNSLKPEDTAVYYCAADPASPAFGDYWGQGTQVTVSSQVQLVESGGGLVQAGGSLRLSCAASGIIFGRNAMGWYRQAPGKERELVAGITRRYSITYYADSVKGRFTISRDNAKNTVYLQMNSLKPEDTAVYYCAADPASPAWGDYWGQGTQVTVSSQVQLVESGGGLVQAGGSLRLSCAASGIIFGRNAMGWYRQAPGKERELVAGITRRYSITYYADSVKGRFTISRDNAKNTVYLQMNSLKPEDTAVYYCAADPAVPAPGDYWGQGTQVTVSSQVQLVESGGGLVQAGGSLRLSCAASGIIFGRNAMGWYRQAPGKERELVAGITRRYSITYYADSVKGRFTISRDNAKNTVYLQMNSLKPEDTAVYYCAADPAVPAYGDYWGQGTQVTVSSQVQLVESGGGLVQAGGSLRLSCAASGIIFGRNAMGWYRQAPGKERELVAGITRRYSITYYADSVKGRFTISRDNAKNTVYLQMNSLKPEDTAVYYCAADPAVPAFGDYWGQGTQVTVSS

SEQ ID NO: 586 - protein, 1904 aa, Artificial Sequence
  Synthetic sdABD sequence of MASC monomer
QVQLVESGGGLVQAGGSLRLSCAASGIIFGRNAMGWYRQAPGKERELVAGITRRYSITYYADSVKGRFTISRDNAKNTVYLQMNSLKPEDTAVYYCAADPAVPAWGDYWGQGTQVTVSSQVQLVESGGGLVQAGGSLRLSCAASGIIFGRNAMGWYRQAPGKERELVAGITRRYSITYYADSVKGRFTISRDNAKNTVYLQMNSLKPEDTAVYYCAADPALPAPGDYWGQGTQVTVSSQVQLVESGGGLVQAGGSLRLSCAASGIIFGRNAMGWYRQAPGKERELVAGITRRYSITYYADSVKGRFTISRDNAKNTVYLQMNSLKPEDTAVYYCAADPALPAYGDYWGQGTQVTVSSQVQLVESGGGLVQAGGSLRLSCAASGIIFGRNAMGWYRQAPGKERELVAGITRRYSITYYADSVKGRFTISRDNAKNTVYLQMNSLKPEDTAVYYCAADPALPAFGDYWGQGTQVTVSSQVQLVESGGGLVQAGGSLRLSCAASGIIFGRNAMGWYRQAPGKERELVAGITRRYSITYYADSVKGRFTISRDNAKNTVYLQMNSLKPEDTAVYYCAADPALPAWGDYWGQGTQVTVSSQVQLVESGGGLVQAGGSLRLSCAASGIIFGRNAMGWYRQAPGKERELVAGITRRYSITYYADSVKGRFTISRDNAKNTVYLQMNSLKPEDTAVYYCAADPAIPAPGDYWGQGTQVTVSSQVQLVESGGGLVQAGGSLRLSCAASGIIFGRNAMGWYRQAPGKERELVAGITRRYSITYYADSVKGRFTISRDNAKNTVYLQMNSLKPEDTAVYYCAADPAIPAYGDYWGQGTQVTVSSQVQLVESGGGLVQAGGSLRLSCAASGIIFGRNAMGWYRQAPGKERELVAGITRRYSITYYADSVKGRFTISRDNAKNTVYLQMNSLKPEDTAVYYCAADPAIPAFGDYWGQGTQVTVSSQVQLVESGGGLVQAGGSLRLSCAASGIIFGRNAMGWYRQAPGKERELVAGITRRYSITYYADSVKGRFTISRDNAKNTVYLQMNSLKPEDTAVYYCAADPAIPAWGDYWGQGTQVTVSSQVQLVESGGGLVQAGGSLRLSCAASGIIFGRNAMGWYRQAPGKERELVAGITRRYSITYYADSVKGRFTISRDNAKNTVYLQMNSLKPEDTAVYYCAADPATPAPGDYWGQGTQVTVSSQVQLVESGGGLVQAGGSLRLSCAASGIIFGRNAMGWYRQAPGKERELVAGITRRYSITYYADSVKGRFTISRDNAKNTVYLQMNSLKPEDTAVYYCAADPATPAYGDYWGQGTQVTVSSQVQLVESGGGLVQAGGSLRLSCAASGIIFGRNAMGWYRQAPGKERELVAGITRRYSITYYADSVKGRFTISRDNAKNTVYLQMNSLKPEDTAVYYCAADPATPAFGDYWGQGTQVTVSSQVQLVESGGGLVQAGGSLRLSCAASGIIFGRNAMGWYRQAPGKERELVAGITRRYSITYYADSVKGRFTISRDNAKNTVYLQMNSLKPEDTAVYYCAADPATPAWGDYWGQGTQVTVSSQVQLVESGGGLVQAGGSLRLSCAASGIIFGRNAMGWYRQAPGKERELVAGITRRGSITYYADSVKGRFTISRDNAKNTVYLQMNSLKPEDTAVYYCAADPASPAPGDYWGQGTQVTVSSQVQLVESGGGLVQAGGSLRLSCAASGIIFGRNAMGWYRQAPGKERELVAGITRRGSITYYADSVKGRFTISRDNAKNTVYLQMNSLKPEDTAVYYCAADPASPAYGDYWGQGTQVTVSSQVQLVESGGGLVQAGGSLRLSCAASGIIFGRNAMGWYRQAPGKERELVAGITRRGSITYYADSVKGRFTISRDNAKNTVYLQMNSLKPEDTAVYYCAADPASPAFGDYWGQGTQVTVSS

SEQ ID NO: 587 - protein, 1904 aa, Artificial Sequence
  Synthetic sdABD sequence of MASC monomer
QVQLVESGGGLVQAGGSLRLSCAASGIIFGRNAMGWYRQAPGKERELVAGITRRGSITYYADSVKGRFTISRDNAKNTVYLQMNSLKPEDTAVYYCAADPASPAWGDYWGQGTQVTVSSQVQLVESGGGLVQAGGSLRLSCAASGIIFGRNAMGWYRQAPGKERELVAGITRRGSITYYADSVKGRFTISRDNAKNTVYLQMNSLKPEDTAVYYCAADPAVPAPGDYWGQGTQVTVSSQVQLVESGGGLVQAGGSLRLSCAASGIIFGRNAMGWYRQAPGKERELVAGITRRGSITYYADSVKGRFTISRDNAKNTVYLQMNSLKPEDTAVYYCAADPAVPAYGDYWGQGTQVTVSSQVQLVESGGGLVQAGGSLRLSCAASGIIFGRNAMGWYRQAPGKERELVAGITRRGSITYYADSVKGRFTISRDNAKNTVYLQMNSLKPEDTAVYYCAADPAVPAFGDYWGQGTQVTVSSQVQLVESGGGLVQAGGSLRLSCAASGIIFGRNAMGWYRQAPGKERELVAGITRRGSITYYADSVKGRFTISRDNAKNTVYLQMNSLKPEDTAVYYCAADPAVPAWGDYWGQGTQVTVSSQVQLVESGGGLVQAGGSLRLSCAASGIIFGRNAMGWYRQAPGKERELVAGITRRGSITYYADSVKGRFTISRDNAKNTVYLQMNSLKPEDTAVYYCAADPALPAPGDYWGQGTQVTVSSQVQLVESGGGLVQAGGSLRLSCAASGIIFGRNAMGWYRQAPGKERELVAGITRRGSITYYADSVKGRFTISRDNAKNTVYLQMNSLKPEDTAVYYCAADPALPAYGDYWGQGTQVTVSSQVQLVESGGGLVQAGGSLRLSCAASGIIFGRNAMGWYRQAPGKERELVAGITRRGSITYYADSVKGRFTISRDNAKNTVYLQMNSLKPEDTAVYYCAADPALPAFGDYWGQGTQVTVSSQVQLVESGGGLVQAGGSLRLSCAASGIIFGRNAMGWYRQAPGKERELVAGITRRGSITYYADSVKGRFTISRDNAKNTVYLQMNSLKPEDTAVYYCAADPALPAWGDYWGQGTQVTVSSQVQLVESGGGLVQAGGSLRLSCAASGIIFGRNAMGWYRQAPGKERELVAGITRRGSITYYADSVKGRFTISRDNAKNTVYLQMNSLKPEDTAVYYCAADPAIPAPGDYWGQGTQVTVSSQVQLVESGGGLVQAGGSLRLSCAASGIIFGRNAMGWYRQAPGKERELVAGITRRGSITYYADSVKGRFTISRDNAKNTVYLQMNSLKPEDTAVYYCAADPAIPAYGDYWGQGTQVTVSSQVQLVESGGGLVQAGGSLRLSCAASGIIFGRNAMGWYRQAPGKERELVAGITRRGSITYYADSVKGRFTISRDNAKNTVYLQMNSLKPEDTAVYYCAADPAIPAFGDYWGQGTQVTVSSQVQLVESGGGLVQAGGSLRLSCAASGIIFGRNAMGWYRQAPGKERELVAGITRRGSITYYADSVKGRFTISRDNAKNTVYLQMNSLKPEDTAVYYCAADPAIPAWGDYWGQGTQVTVSSQVQLVESGGGLVQAGGSLRLSCAASGIIFGRNAMGWYRQAPGKERELVAGITRRGSITYYADSVKGRFTISRDNAKNTVYLQMNSLKPEDTAVYYCAADPATPAPGDYWGQGTQVTVSSQVQLVESGGGLVQAGGSLRLSCAASGIIFGRNAMGWYRQAPGKERELVAGITRRGSITYYADSVKGRFTISRDNAKNTVYLQMNSLKPEDTAVYYCAADPATPAYGDYWGQGTQVTVSSQVQLVESGGGLVQAGGSLRLSCAASGIIFGRNAMGWYRQAPGKERELVAGITRRGSITYYADSVKGRFTISRDNAKNTVYLQMNSLKPEDTAVYYCAADPATPAFGDYWGQGTQVTVSS

SEQ ID NO: 588 - protein, 1904 aa, Artificial Sequence
  Synthetic sdABD sequence of MASC monomer
QVQLVESGGGLVQAGGSLRLSCAASGIIFGRNAMGWYRQAPGKERELVAGITRRGSITYYADSVKGRFTISRDNAKNTVYLQMNSLKPEDTAVYYCAADPATPAWGDYWGQGTQVTVSSQVQLVESGGGLVQAGGSLRLSCAASGIIFGRNAMGWYRQAPGKERELVAGITRRQSITYYADSVKGRFTISRDNAKNTVYLQMNSLKPEDTAVYYCAADPASPAPGDYWGQGTQVTVSSQVQLVESGGGLVQAGGSLRLSCAASGIIFGRNAMGWYRQAPGKERELVAGITRRQSITYYADSVKGRFTISRDNAKNTVYLQMNSLKPEDTAVYYCAADPASPAYGDYWGQGTQVTVSSQVQLVESGGGLVQAGGSLRLSCAASGIIFGRNAMGWYRQAPGKERELVAGITRRQSITYYADSVKGRFTISRDNAKNTVYLQMNSLKPEDTAVYYCAADPASPAFGDYWGQGTQVTVSSQVQLVESGGGLVQAGGSLRLSCAASGIIFGRNAMGWYRQAPGKERELVAGITRRQSITYYADSVKGRFTISRDNAKNTVYLQMNSLKPEDTAVYYCAADPASPAWGDYWGQGTQVTVSSQVQLVESGGGLVQAGGSLRLSCAASGIIFGRNAMGWYRQAPGKERELVAGITRRQSITYYADSVKGRFTISRDNAKNTVYLQMNSLKPEDTAVYYCAADPAVPAPGDYWGQGTQVTVSSQVQLVESGGGLVQAGGSLRLSCAASGIIFGRNAMGWYRQAPGKERELVAGITRRQSITYYADSVKGRFTISRDNAKNTVYLQMNSLKPEDTAVYYCAADPAVPAYGDYWGQGTQVTVSSQVQLVESGGGLVQAGGSLRLSCAASGIIFGRNAMGWYRQAPGKERELVAGITRRQSITYYADSVKGRFTISRDNAKNTVYLQMNSLKPEDTAVYYCAADPAVPAFGDYWGQGTQVTVSSQVQLVESGGGLVQAGGSLRLSCAASGIIFGRNAMGWYRQAPGKERELVAGITRRQSITYYADSVKGRFTISRDNAKNTVYLQMNSLKPEDTAVYYCAADPAVPAWGDYWGQGTQVTVSSQVQLVESGGGLVQAGGSLRLSCAASGIIFGRNAMGWYRQAPGKERELVAGITRRQSITYYADSVKGRFTISRDNAKNTVYLQMNSLKPEDTAVYYCAADPALPAPGDYWGQGTQVTVSSQVQLVESGGGLVQAGGSLRLSCAASGIIFGRNAMGWYRQAPGKERELVAGITRRQSITYYADSVKGRFTISRDNAKNTVYLQMNSLKPEDTAVYYCAADPALPAYGDYWGQGTQVTVSSQVQLVESGGGLVQAGGSLRLSCAASGIIFGRNAMGWYRQAPGKERELVAGITRRQSITYYADSVKGRFTISRDNAKNTVYLQMNSLKPEDTAVYYCAADPALPAFGDYWGQGTQVTVSSQVQLVESGGGLVQAGGSLRLSCAASGIIFGRNAMGWYRQAPGKERELVAGITRRQSITYYADSVKGRFTISRDNAKNTVYLQMNSLKPEDTAVYYCAADPALPAWGDYWGQGTQVTVSSQVQLVESGGGLVQAGGSLRLSCAASGIIFGRNAMGWYRQAPGKERELVAGITRRQSITYYADSVKGRFTISRDNAKNTVYLQMNSLKPEDTAVYYCAADPAIPAPGDYWGQGTQVTVSSQVQLVESGGGLVQAGGSLRLSCAASGIIFGRNAMGWYRQAPGKERELVAGITRRQSITYYADSVKGRFTISRDNAKNTVYLQMNSLKPEDTAVYYCAADPAIPAYGDYWGQGTQVTVSSQVQLVESGGGLVQAGGSLRLSCAASGIIFGRNAMGWYRQAPGKERELVAGITRRQSITYYADSVKGRFTISRDNAKNTVYLQMNSLKPEDTAVYYCAADPAIPAFGDYWGQGTQVTVSS

SEQ ID NO: 589 - protein, 1904 aa, Artificial Sequence
  Synthetic sdABD sequence of MASC monomer
QVQLVESGGGLVQAGGSLRLSCAASGIIFGRNAMGWYRQAPGKERELVAGITRRQSITYYADSVKGRFTISRDNAKNTVYLQMNSLKPEDTAVYYCAADPAIPAWGDYWGQGTQVTVSSQVQLVESGGGLVQAGGSLRLSCAASGIIFGRNAMGWYRQAPGKERELVAGITRRQSITYYADSVKGRFTISRDNAKNTVYLQMNSLKPEDTAVYYCAADPATPAPGDYWGQGTQVTVSSQVQLVESGGGLVQAGGSLRLSCAASGIIFGRNAMGWYRQAPGKERELVAGITRRQSITYYADSVKGRFTISRDNAKNTVYLQMNSLKPEDTAVYYCAADPATPAYGDYWGQGTQVTVSSQVQLVESGGGLVQAGGSLRLSCAASGIIFGRNAMGWYRQAPGKERELVAGITRRQSITYYADSVKGRFTISRDNAKNTVYLQMNSLKPEDTAVYYCAADPATPAFGDYWGQGTQVTVSSQVQLVESGGGLVQAGGSLRLSCAASGIIFGRNAMGWYRQAPGKERELVAGITRRQSITYYADSVKGRFTISRDNAKNTVYLQMNSLKPEDTAVYYCAADPATPAWGDYWGQGTQVTVSSQVQLVESGGGLVQAGGSLRLSCAASGYIFGRNAMGWYRQAPGKERELVAGITRRGSITYYADSVKGRFTISRDNAKNTVYLQMNSLKPEDTAVYYCAADPASPAPGDYWGQGTQVTVSSQVQLVESGGGLVQAGGSLRLSCAASGYIFGRNAMGWYRQAPGKERELVAGITRRGSITYYADSVKGRFTISRDNAKNTVYLQMNSLKPEDTAVYYCAADPASPAYGDYWGQGTQVTVSSQVQLVESGGGLVQAGGSLRLSCAASGYIFGRNAMGWYRQAPGKERELVAGITRRGSITYYADSVKGRFTISRDNAKNTVYLQMNSLKPEDTAVYYCAADPASPAFGDYWGQGTQVTVSSQVQLVESGGGLVQAGGSLRLSCAASGYIFGRNAMGWYRQAPGKERELVAGITRRGSITYYADSVKGRFTISRDNAKNTVYLQMNSLKPEDTAVYYCAADPASPAWGDYWGQGTQVTVSSQVQLVESGGGLVQAGGSLRLSCAASGYIFGRNAMGWYRQAPGKERELVAGITRRGSITYYADSVKGRFTISRDNAKNTVYLQMNSLKPEDTAVYYCAADPAVPAPGDYWGQGTQVTVSSQVQLVESGGGLVQAGGSLRLSCAASGYIFGRNAMGWYRQAPGKERELVAGITRRGSITYYADSVKGRFTISRDNAKNTVYLQMNSLKPEDTAVYYCAADPAVPAYGDYWGQGTQVTVSSQVQLVESGGGLVQAGGSLRLSCAASGYIFGRNAMGWYRQAPGKERELVAGITRRGSITYYADSVKGRFTISRDNAKNTVYLQMNSLKPEDTAVYYCAADPAVPAFGDYWGQGTQVTVSSQVQLVESGGGLVQAGGSLRLSCAASGYIFGRNAMGWYRQAPGKERELVAGITRRGSITYYADSVKGRFTISRDNAKNTVYLQMNSLKPEDTAVYYCAADPAVPAWGDYWGQGTQVTVSSQVQLVESGGGLVQAGGSLRLSCAASGYIFGRNAMGWYRQAPGKERELVAGITRRGSITYYADSVKGRFTISRDNAKNTVYLQMNSLKPEDTAVYYCAADPALPAPGDYWGQGTQVTVSSQVQLVESGGGLVQAGGSLRLSCAASGYIFGRNAMGWYRQAPGKERELVAGITRRGSITYYADSVKGRFTISRDNAKNTVYLQMNSLKPEDTAVYYCAADPALPAYGDYWGQGTQVTVSSQVQLVESGGGLVQAGGSLRLSCAASGYIFGRNAMGWYRQAPGKERELVAGITRRGSITYYADSVKGRFTISRDNAKNTVYLQMNSLKPEDTAVYYCAADPALPAFGDYWGQGTQVTVSS

SEQ ID NO: 590 - protein, 1904 aa, Artificial Sequence
  Synthetic sdABD sequence of MASC monomer
QVQLVESGGGLVQAGGSLRLSCAASGYIFGRNAMGWYRQAPGKERELVAGITRRGSITYYADSVKGRFTISRDNAKNTVYLQMNSLKPEDTAVYYCAADPALPAWGDYWGQGTQVTVSSQVQLVESGGGLVQAGGSLRLSCAASGYIFGRNAMGWYRQAPGKERELVAGITRRGSITYYADSVKGRFTISRDNAKNTVYLQMNSLKPEDTAVYYCAADPAIPAPGDYWGQGTQVTVSSQVQLVESGGGLVQAGGSLRLSCAASGYIFGRNAMGWYRQAPGKERELVAGITRRGSITYYADSVKGRFTISRDNAKNTVYLQMNSLKPEDTAVYYCAADPAIPAYGDYWGQGTQVTVSSQVQLVESGGGLVQAGGSLRLSCAASGYIFGRNAMGWYRQAPGKERELVAGITRRGSITYYADSVKGRFTISRDNAKNTVYLQMNSLKPEDTAVYYCAADPAIPAFGDYWGQGTQVTVSSQVQLVESGGGLVQAGGSLRLSCAASGYIFGRNAMGWYRQAPGKERELVAGITRRGSITYYADSVKGRFTISRDNAKNTVYLQMNSLKPEDTAVYYCAADPAIPAWGDYWGQGTQVTVSSQVQLVESGGGLVQAGGSLRLSCAASGYIFGRNAMGWYRQAPGKERELVAGITRRGSITYYADSVKGRFTISRDNAKNTVYLQMNSLKPEDTAVYYCAADPATPAPGDYWGQGTQVTVSSQVQLVESGGGLVQAGGSLRLSCAASGYIFGRNAMGWYRQAPGKERELVAGITRRGSITYYADSVKGRFTISRDNAKNTVYLQMNSLKPEDTAVYYCAADPATPAYGDYWGQGTQVTVSSQVQLVESGGGLVQAGGSLRLSCAASGYIFGRNAMGWYRQAPGKERELVAGITRRGSITYYADSVKGRFTISRDNAKNTVYLQMNSLKPEDTAVYYCAADPATPAFGDYWGQGTQVTVSSQVQLVESGGGLVQAGGSLRLSCAASGYIFGRNAMGWYRQAPGKERELVAGITRRGSITYYADSVKGRFTISRDNAKNTVYLQMNSLKPEDTAVYYCAADPATPAWGDYWGQGTQVTVSSQVQLVESGGGLVQAGGSLRLSCAASGYIFGRNAMGWYRQAPGKERELVAGITRRHSITYYADSVKGRFTISRDNAKNTVYLQMNSLKPEDTAVYYCAADPASPAPGDYWGQGTQVTVSSQVQLVESGGGLVQAGGSLRLSCAASGYIFGRNAMGWYRQAPGKERELVAGITRRHSITYYADSVKGRFTISRDNAKNTVYLQMNSLKPEDTAVYYCAADPASPAYGDYWGQGTQVTVSSQVQLVESGGGLVQAGGSLRLSCAASGYIFGRNAMGWYRQAPGKERELVAGITRRHSITYYADSVKGRFTISRDNAKNTVYLQMNSLKPEDTAVYYCAADPASPAFGDYWGQGTQVTVSSQVQLVESGGGLVQAGGSLRLSCAASGYIFGRNAMGWYRQAPGKERELVAGITRRHSITYYADSVKGRFTISRDNAKNTVYLQMNSLKPEDTAVYYCAADPASPAWGDYWGQGTQVTVSSQVQLVESGGGLVQAGGSLRLSCAASGYIFGRNAMGWYRQAPGKERELVAGITRRHSITYYADSVKGRFTISRDNAKNTVYLQMNSLKPEDTAVYYCAADPAVPAPGDYWGQGTQVTVSSQVQLVESGGGLVQAGGSLRLSCAASGYIFGRNAMGWYRQAPGKERELVAGITRRHSITYYADSVKGRFTISRDNAKNTVYLQMNSLKPEDTAVYYCAADPAVPAYGDYWGQGTQVTVSSQVQLVESGGGLVQAGGSLRLSCAASGYIFGRNAMGWYRQAPGKERELVAGITRRHSITYYADSVKGRFTISRDNAKNTVYLQMNSLKPEDTAVYYCAADPAVPAFGDYWGQGTQVTVSS

SEQ ID NO: 591 - protein, 1904 aa, Artificial Sequence
  Synthetic sdABD sequence of MASC monomer
QVQLVESGGGLVQAGGSLRLSCAASGYIFGRNAMGWYRQAPGKERELVAGITRRHSITYYADSVKGRFTISRDNAKNTVYLQMNSLKPEDTAVYYCAADPAVPAWGDYWGQGTQVTVSSQVQLVESGGGLVQAGGSLRLSCAASGYIFGRNAMGWYRQAPGKERELVAGITRRHSITYYADSVKGRFTISRDNAKNTVYLQMNSLKPEDTAVYYCAADPALPAPGDYWGQGTQVTVSSQVQLVESGGGLVQAGGSLRLSCAASGYIFGRNAMGWYRQAPGKERELVAGITRRHSITYYADSVKGRFTISRDNAKNTVYLQMNSLKPEDTAVYYCAADPALPAYGDYWGQGTQVTVSSQVQLVESGGGLVQAGGSLRLSCAASGYIFGRNAMGWYRQAPGKERELVAGITRRHSITYYADSVKGRFTISRDNAKNTVYLQMNSLKPEDTAVYYCAADPALPAFGDYWGQGTQVTVSSQVQLVESGGGLVQAGGSLRLSCAASGYIFGRNAMGWYRQAPGKERELVAGITRRHSITYYADSVKGRFTISRDNAKNTVYLQMNSLKPEDTAVYYCAADPALPAWGDYWGQGTQVTVSSQVQLVESGGGLVQAGGSLRLSCAASGYIFGRNAMGWYRQAPGKERELVAGITRRHSITYYADSVKGRFTISRDNAKNTVYLQMNSLKPEDTAVYYCAADPAIPAPGDYWGQGTQVTVSSQVQLVESGGGLVQAGGSLRLSCAASGYIFGRNAMGWYRQAPGKERELVAGITRRHSITYYADSVKGRFTISRDNAKNTVYLQMNSLKPEDTAVYYCAADPAIPAYGDYWGQGTQVTVSSQVQLVESGGGLVQAGGSLRLSCAASGYIFGRNAMGWYRQAPGKERELVAGITRRHSITYYADSVKGRFTISRDNAKNTVYLQMNSLKPEDTAVYYCAADPAIPAFGDYWGQGTQVTVSSQVQLVESGGGLVQAGGSLRLSCAASGYIFGRNAMGWYRQAPGKERELVAGITRRHSITYYADSVKGRFTISRDNAKNTVYLQMNSLKPEDTAVYYCAADPAIPAWGDYWGQGTQVTVSSQVQLVESGGGLVQAGGSLRLSCAASGYIFGRNAMGWYRQAPGKERELVAGITRRHSITYYADSVKGRFTISRDNAKNTVYLQMNSLKPEDTAVYYCAADPATPAPGDYWGQGTQVTVSSQVQLVESGGGLVQAGGSLRLSCAASGYIFGRNAMGWYRQAPGKERELVAGITRRHSITYYADSVKGRFTISRDNAKNTVYLQMNSLKPEDTAVYYCAADPATPAYGDYWGQGTQVTVSSQVQLVESGGGLVQAGGSLRLSCAASGYIFGRNAMGWYRQAPGKERELVAGITRRHSITYYADSVKGRFTISRDNAKNTVYLQMNSLKPEDTAVYYCAADPATPAFGDYWGQGTQVTVSSQVQLVESGGGLVQAGGSLRLSCAASGYIFGRNAMGWYRQAPGKERELVAGITRRHSITYYADSVKGRFTISRDNAKNTVYLQMNSLKPEDTAVYYCAADPATPAWGDYWGQGTQVTVSSQVQLVESGGGLVQAGGSLRLSCAASGYIFGRNAMGWYRQAPGKERELVAGITRRYSITYYADSVKGRFTISRDNAKNTVYLQMNSLKPEDTAVYYCAADPASPAPGDYWGQGTQVTVSSQVQLVESGGGLVQAGGSLRLSCAASGYIFGRNAMGWYRQAPGKERELVAGITRRYSITYYADSVKGRFTISRDNAKNTVYLQMNSLKPEDTAVYYCAADPASPAYGDYWGQGTQVTVSSQVQLVESGGGLVQAGGSLRLSCAASGYIFGRNAMGWYRQAPGKERELVAGITRRYSITYYADSVKGRFTISRDNAKNTVYLQMNSLKPEDTAVYYCAADPASPAFGDYWGQGTQVTVSS

SEQ ID NO: 592 - protein, 1904 aa, Artificial Sequence
  Synthetic sdABD sequence of MASC monomer
QVQLVESGGGLVQAGGSLRLSCAASGYIFGRNAMGWYRQAPGKERELVAGITRRYSITYYADSVKGRFTISRDNAKNTVYLQMNSLKPEDTAVYYCAADPASPAWGDYWGQGTQVTVSSQVQLVESGGGLVQAGGSLRLSCAASGYIFGRNAMGWYRQAPGKERELVAGITRRYSITYYADSVKGRFTISRDNAKNTVYLQMNSLKPEDTAVYYCAADPAVPAPGDYWGQGTQVTVSSQVQLVESGGGLVQAGGSLRLSCAASGYIFGRNAMGWYRQAPGKERELVAGITRRYSITYYADSVKGRFTISRDNAKNTVYLQMNSLKPEDTAVYYCAADPAVPAYGDYWGQGTQVTVSSQVQLVESGGGLVQAGGSLRLSCAASGYIFGRNAMGWYRQAPGKERELVAGITRRYSITYYADSVKGRFTISRDNAKNTVYLQMNSLKPEDTAVYYCAADPAVPAFGDYWGQGTQVTVSSQVQLVESGGGLVQAGGSLRLSCAASGYIFGRNAMGWYRQAPGKERELVAGITRRYSITYYADSVKGRFTISRDNAKNTVYLQMNSLKPEDTAVYYCAADPAVPAWGDYWGQGTQVTVSSQVQLVESGGGLVQAGGSLRLSCAASGYIFGRNAMGWYRQAPGKERELVAGITRRYSITYYADSVKGRFTISRDNAKNTVYLQMNSLKPEDTAVYYCAADPALPAPGDYWGQGTQVTVSSQVQLVESGGGLVQAGGSLRLSCAASGYIFGRNAMGWYRQAPGKERELVAGITRRYSITYYADSVKGRFTISRDNAKNTVYLQMNSLKPEDTAVYYCAADPALPAYGDYWGQGTQVTVSSQVQLVESGGGLVQAGGSLRLSCAASGYIFGRNAMGWYRQAPGKERELVAGITRRYSITYYADSVKGRFTISRDNAKNTVYLQMNSLKPEDTAVYYCAADPALPAFGDYWGQGTQVTVSSQVQLVESGGGLVQAGGSLRLSCAASGYIFGRNAMGWYRQAPGKERELVAGITRRYSITYYADSVKGRFTISRDNAKNTVYLQMNSLKPEDTAVYYCAADPALPAWGDYWGQGTQVTVSSQVQLVESGGGLVQAGGSLRLSCAASGYIFGRNAMGWYRQAPGKERELVAGITRRYSITYYADSVKGRFTISRDNAKNTVYLQMNSLKPEDTAVYYCAADPAIPAPGDYWGQGTQVTVSSQVQLVESGGGLVQAGGSLRLSCAASGYIFGRNAMGWYRQAPGKERELVAGITRRYSITYYADSVKGRFTISRDNAKNTVYLQMNSLKPEDTAVYYCAADPAIPAYGDYWGQGTQVTVSSQVQLVESGGGLVQAGGSLRLSCAASGYIFGRNAMGWYRQAPGKERELVAGITRRYSITYYADSVKGRFTISRDNAKNTVYLQMNSLKPEDTAVYYCAADPAIPAFGDYWGQGTQVTVSSQVQLVESGGGLVQAGGSLRLSCAASGYIFGRNAMGWYRQAPGKERELVAGITRRYSITYYADSVKGRFTISRDNAKNTVYLQMNSLKPEDTAVYYCAADPAIPAWGDYWGQGTQVTVSSQVQLVESGGGLVQAGGSLRLSCAASGYIFGRNAMGWYRQAPGKERELVAGITRRYSITYYADSVKGRFTISRDNAKNTVYLQMNSLKPEDTAVYYCAADPATPAPGDYWGQGTQVTVSSQVQLVESGGGLVQAGGSLRLSCAASGYIFGRNAMGWYRQAPGKERELVAGITRRYSITYYADSVKGRFTISRDNAKNTVYLQMNSLKPEDTAVYYCAADPATPAYGDYWGQGTQVTVSSQVQLVESGGGLVQAGGSLRLSCAASGYIFGRNAMGWYRQAPGKERELVAGITRRYSITYYADSVKGRFTISRDNAKNTVYLQMNSLKPEDTAVYYCAADPATPAFGDYWGQGTQVTVSS

SEQ ID NO: 593 - protein, 1904 aa, Artificial Sequence
  Synthetic sdABD sequence of MASC monomer
QVQLVESGGGLVQAGGSLRLSCAASGYIFGRNAMGWYRQAPGKERELVAGITRRYSITYYADSVKGRFTISRDNAKNTVYLQMNSLKPEDTAVYYCAADPATPAWGDYWGQGTQVTVSSQVQLVESGGGLVQAGGSLRLSCAASGYIFGRNAMGWYRQAPGKERELVAGITRRGSITYYADSVKGRFTISRDNAKNTVYLQMNSLKPEDTAVYYCAADPASPAPGDYWGQGTQVTVSSQVQLVESGGGLVQAGGSLRLSCAASGYIFGRNAMGWYRQAPGKERELVAGITRRGSITYYADSVKGRFTISRDNAKNTVYLQMNSLKPEDTAVYYCAADPASPAYGDYWGQGTQVTVSSQVQLVESGGGLVQAGGSLRLSCAASGYIFGRNAMGWYRQAPGKERELVAGITRRGSITYYADSVKGRFTISRDNAKNTVYLQMNSLKPEDTAVYYCAADPASPAFGDYWGQGTQVTVSSQVQLVESGGGLVQAGGSLRLSCAASGYIFGRNAMGWYRQAPGKERELVAGITRRGSITYYADSVKGRFTISRDNAKNTVYLQMNSLKPEDTAVYYCAADPASPAWGDYWGQGTQVTVSSQVQLVESGGGLVQAGGSLRLSCAASGYIFGRNAMGWYRQAPGKERELVAGITRRGSITYYADSVKGRFTISRDNAKNTVYLQMNSLKPEDTAVYYCAADPAVPAPGDYWGQGTQVTVSSQVQLVESGGGLVQAGGSLRLSCAASGYIFGRNAMGWYRQAPGKERELVAGITRRGSITYYADSVKGRFTISRDNAKNTVYLQMNSLKPEDTAVYYCAADPAVPAYGDYWGQGTQVTVSSQVQLVESGGGLVQAGGSLRLSCAASGYIFGRNAMGWYRQAPGKERELVAGITRRGSITYYADSVKGRFTISRDNAKNTVYLQMNSLKPEDTAVYYCAADPAVPAFGDYWGQGTQVTVSSQVQLVESGGGLVQAGGSLRLSCAASGYIFGRNAMGWYRQAPGKERELVAGITRRGSITYYADSVKGRFTISRDNAKNTVYLQMNSLKPEDTAVYYCAADPAVPAWGDYWGQGTQVTVSSQVQLVESGGGLVQAGGSLRLSCAASGYIFGRNAMGWYRQAPGKERELVAGITRRGSITYYADSVKGRFTISRDNAKNTVYLQMNSLKPEDTAVYYCAADPALPAPGDYWGQGTQVTVSSQVQLVESGGGLVQAGGSLRLSCAASGYIFGRNAMGWYRQAPGKERELVAGITRRGSITYYADSVKGRFTISRDNAKNTVYLQMNSLKPEDTAVYYCAADPALPAYGDYWGQGTQVTVSSQVQLVESGGGLVQAGGSLRLSCAASGYIFGRNAMGWYRQAPGKERELVAGITRRGSITYYADSVKGRFTISRDNAKNTVYLQMNSLKPEDTAVYYCAADPALPAFGDYWGQGTQVTVSSQVQLVESGGGLVQAGGSLRLSCAASGYIFGRNAMGWYRQAPGKERELVAGITRRGSITYYADSVKGRFTISRDNAKNTVYLQMNSLKPEDTAVYYCAADPALPAWGDYWGQGTQVTVSSQVQLVESGGGLVQAGGSLRLSCAASGYIFGRNAMGWYRQAPGKERELVAGITRRGSITYYADSVKGRFTISRDNAKNTVYLQMNSLKPEDTAVYYCAADPAIPAPGDYWGQGTQVTVSSQVQLVESGGGLVQAGGSLRLSCAASGYIFGRNAMGWYRQAPGKERELVAGITRRGSITYYADSVKGRFTISRDNAKNTVYLQMNSLKPEDTAVYYCAADPAIPAYGDYWGQGTQVTVSSQVQLVESGGGLVQAGGSLRLSCAASGYIFGRNAMGWYRQAPGKERELVAGITRRGSITYYADSVKGRFTISRDNAKNTVYLQMNSLKPEDTAVYYCAADPAIPAFGDYWGQGTQVTVSS

SEQ ID NO: 594 - protein, 1904 aa, Artificial Sequence
  Synthetic sdABD sequence of MASC monomer
QVQLVESGGGLVQAGGSLRLSCAASGYIFGRNAMGWYRQAPGKERELVAGITRRGSITYYADSVKGRFTISRDNAKNTVYLQMNSLKPEDTAVYYCAADPAIPAWGDYWGQGTQVTVSSQVQLVESGGGLVQAGGSLRLSCAASGYIFGRNAMGWYRQAPGKERELVAGITRRGSITYYADSVKGRFTISRDNAKNTVYLQMNSLKPEDTAVYYCAADPATPAPGDYWGQGTQVTVSSQVQLVESGGGLVQAGGSLRLSCAASGYIFGRNAMGWYRQAPGKERELVAGITRRGSITYYADSVKGRFTISRDNAKNTVYLQMNSLKPEDTAVYYCAADPATPAYGDYWGQGTQVTVSSQVQLVESGGGLVQAGGSLRLSCAASGYIFGRNAMGWYRQAPGKERELVAGITRRGSITYYADSVKGRFTISRDNAKNTVYLQMNSLKPEDTAVYYCAADPATPAFGDYWGQGTQVTVSSQVQLVESGGGLVQAGGSLRLSCAASGYIFGRNAMGWYRQAPGKERELVAGITRRGSITYYADSVKGRFTISRDNAKNTVYLQMNSLKPEDTAVYYCAADPATPAWGDYWGQGTQVTVSSQVQLVESGGGLVQAGGSLRLSCAASGYIFGRNAMGWYRQAPGKERELVAGITRRQSITYYADSVKGRFTISRDNAKNTVYLQMNSLKPEDTAVYYCAADPASPAPGDYWGQGTQVTVSSQVQLVESGGGLVQAGGSLRLSCAASGYIFGRNAMGWYRQAPGKERELVAGITRRQSITYYADSVKGRFTISRDNAKNTVYLQMNSLKPEDTAVYYCAADPASPAYGDYWGQGTQVTVSSQVQLVESGGGLVQAGGSLRLSCAASGYIFGRNAMGWYRQAPGKERELVAGITRRQSITYYADSVKGRFTISRDNAKNTVYLQMNSLKPEDTAVYYCAADPASPAFGDYWGQGTQVTVSSQVQLVESGGGLVQAGGSLRLSCAASGYIFGRNAMGWYRQAPGKERELVAGITRRQSITYYADSVKGRFTISRDNAKNTVYLQMNSLKPEDTAVYYCAADPASPAWGDYWGQGTQVTVSSQVQLVESGGGLVQAGGSLRLSCAASGYIFGRNAMGWYRQAPGKERELVAGITRRQSITYYADSVKGRFTISRDNAKNTVYLQMNSLKPEDTAVYYCAADPAVPAPGDYWGQGTQVTVSSQVQLVESGGGLVQAGGSLRLSCAASGYIFGRNAMGWYRQAPGKERELVAGITRRQSITYYADSVKGRFTISRDNAKNTVYLQMNSLKPEDTAVYYCAADPAVPAYGDYWGQGTQVTVSSQVQLVESGGGLVQAGGSLRLSCAASGYIFGRNAMGWYRQAPGKERELVAGITRRQSITYYADSVKGRFTISRDNAKNTVYLQMNSLKPEDTAVYYCAADPAVPAFGDYWGQGTQVTVSSQVQLVESGGGLVQAGGSLRLSCAASGYIFGRNAMGWYRQAPGKERELVAGITRRQSITYYADSVKGRFTISRDNAKNTVYLQMNSLKPEDTAVYYCAADPAVPAWGDYWGQGTQVTVSSQVQLVESGGGLVQAGGSLRLSCAASGYIFGRNAMGWYRQAPGKERELVAGITRRQSITYYADSVKGRFTISRDNAKNTVYLQMNSLKPEDTAVYYCAADPALPAPGDYWGQGTQVTVSSQVQLVESGGGLVQAGGSLRLSCAASGYIFGRNAMGWYRQAPGKERELVAGITRRQSITYYADSVKGRFTISRDNAKNTVYLQMNSLKPEDTAVYYCAADPALPAYGDYWGQGTQVTVSSQVQLVESGGGLVQAGGSLRLSCAASGYIFGRNAMGWYRQAPGKERELVAGITRRQSITYYADSVKGRFTISRDNAKNTVYLQMNSLKPEDTAVYYCAADPALPAFGDYWGQGTQVTVSS

SEQ ID NO: 595 - protein, 1904 aa, Artificial Sequence
  Synthetic sdABD sequence of MASC monomer
QVQLVESGGGLVQAGGSLRLSCAASGYIFGRNAMGWYRQAPGKERELVAGITRRQSITYYADSVKGRFTISRDNAKNTVYLQMNSLKPEDTAVYYCAADPALPAWGDYWGQGTQVTVSSQVQLVESGGGLVQAGGSLRLSCAASGYIFGRNAMGWYRQAPGKERELVAGITRRQSITYYADSVKGRFTISRDNAKNTVYLQMNSLKPEDTAVYYCAADPAIPAPGDYWGQGTQVTVSSQVQLVESGGGLVQAGGSLRLSCAASGYIFGRNAMGWYRQAPGKERELVAGITRRQSITYYADSVKGRFTISRDNAKNTVYLQMNSLKPEDTAVYYCAADPAIPAYGDYWGQGTQVTVSSQVQLVESGGGLVQAGGSLRLSCAASGYIFGRNAMGWYRQAPGKERELVAGITRRQSITYYADSVKGRFTISRDNAKNTVYLQMNSLKPEDTAVYYCAADPAIPAFGDYWGQGTQVTVSSQVQLVESGGGLVQAGGSLRLSCAASGYIFGRNAMGWYRQAPGKERELVAGITRRQSITYYADSVKGRFTISRDNAKNTVYLQMNSLKPEDTAVYYCAADPAIPAWGDYWGQGTQVTVSSQVQLVESGGGLVQAGGSLRLSCAASGYIFGRNAMGWYRQAPGKERELVAGITRRQSITYYADSVKGRFTISRDNAKNTVYLQMNSLKPEDTAVYYCAADPATPAPGDYWGQGTQVTVSSQVQLVESGGGLVQAGGSLRLSCAASGYIFGRNAMGWYRQAPGKERELVAGITRRQSITYYADSVKGRFTISRDNAKNTVYLQMNSLKPEDTAVYYCAADPATPAYGDYWGQGTQVTVSSQVQLVESGGGLVQAGGSLRLSCAASGYIFGRNAMGWYRQAPGKERELVAGITRRQSITYYADSVKGRFTISRDNAKNTVYLQMNSLKPEDTAVYYCAADPATPAFGDYWGQGTQVTVSSQVQLVESGGGLVQAGGSLRLSCAASGYIFGRNAMGWYRQAPGKERELVAGITRRQSITYYADSVKGRFTISRDNAKNTVYLQMNSLKPEDTAVYYCAADPATPAWGDYWGQGTQVTVSSQVQLVESGGGLVQAGGSLRLSCAASGFIFGRNAMGWYRQAPGKERELVAGITRRGSITYYADSVKGRFTISRDNAKNTVYLQMNSLKPEDTAVYYCAADPASPAPGDYWGQGTQVTVSSQVQLVESGGGLVQAGGSLRLSCAASGFIFGRNAMGWYRQAPGKERELVAGITRRGSITYYADSVKGRFTISRDNAKNTVYLQMNSLKPEDTAVYYCAADPASPAYGDYWGQGTQVTVSSQVQLVESGGGLVQAGGSLRLSCAASGFIFGRNAMGWYRQAPGKERELVAGITRRGSITYYADSVKGRFTISRDNAKNTVYLQMNSLKPEDTAVYYCAADPASPAFGDYWGQGTQVTVSSQVQLVESGGGLVQAGGSLRLSCAASGFIFGRNAMGWYRQAPGKERELVAGITRRGSITYYADSVKGRFTISRDNAKNTVYLQMNSLKPEDTAVYYCAADPASPAWGDYWGQGTQVTVSSQVQLVESGGGLVQAGGSLRLSCAASGFIFGRNAMGWYRQAPGKERELVAGITRRGSITYYADSVKGRFTISRDNAKNTVYLQMNSLKPEDTAVYYCAADPAVPAPGDYWGQGTQVTVSSQVQLVESGGGLVQAGGSLRLSCAASGFIFGRNAMGWYRQAPGKERELVAGITRRGSITYYADSVKGRFTISRDNAKNTVYLQMNSLKPEDTAVYYCAADPAVPAYGDYWGQGTQVTVSSQVQLVESGGGLVQAGGSLRLSCAASGFIFGRNAMGWYRQAPGKERELVAGITRRGSITYYADSVKGRFTISRDNAKNTVYLQMNSLKPEDTAVYYCAADPAVPAFGDYWGQGTQVTVSS

SEQ ID NO: 596 - protein, 1904 aa, Artificial Sequence
  Synthetic sdABD sequence of MASC monomer
QVQLVESGGGLVQAGGSLRLSCAASGFIFGRNAMGWYRQAPGKERELVAGITRRGSITYYADSVKGRFTISRDNAKNTVYLQMNSLKPEDTAVYYCAADPAVPAWGDYWGQGTQVTVSSQVQLVESGGGLVQAGGSLRLSCAASGFIFGRNAMGWYRQAPGKERELVAGITRRGSITYYADSVKGRFTISRDNAKNTVYLQMNSLKPEDTAVYYCAADPALPAPGDYWGQGTQVTVSSQVQLVESGGGLVQAGGSLRLSCAASGFIFGRNAMGWYRQAPGKERELVAGITRRGSITYYADSVKGRFTISRDNAKNTVYLQMNSLKPEDTAVYYCAADPALPAYGDYWGQGTQVTVSSQVQLVESGGGLVQAGGSLRLSCAASGFIFGRNAMGWYRQAPGKERELVAGITRRGSITYYADSVKGRFTISRDNAKNTVYLQMNSLKPEDTAVYYCAADPALPAFGDYWGQGTQVTVSSQVQLVESGGGLVQAGGSLRLSCAASGFIFGRNAMGWYRQAPGKERELVAGITRRGSITYYADSVKGRFTISRDNAKNTVYLQMNSLKPEDTAVYYCAADPALPAWGDYWGQGTQVTVSSQVQLVESGGGLVQAGGSLRLSCAASGFIFGRNAMGWYRQAPGKERELVAGITRRGSITYYADSVKGRFTISRDNAKNTVYLQMNSLKPEDTAVYYCAADPAIPAPGDYWGQGTQVTVSSQVQLVESGGGLVQAGGSLRLSCAASGFIFGRNAMGWYRQAPGKERELVAGITRRGSITYYADSVKGRFTISRDNAKNTVYLQMNSLKPEDTAVYYCAADPAIPAYGDYWGQGTQVTVSSQVQLVESGGGLVQAGGSLRLSCAASGFIFGRNAMGWYRQAPGKERELVAGITRRGSITYYADSVKGRFTISRDNAKNTVYLQMNSLKPEDTAVYYCAADPAIPAFGDYWGQGTQVTVSSQVQLVESGGGLVQAGGSLRLSCAASGFIFGRNAMGWYRQAPGKERELVAGITRRGSITYYADSVKGRFTISRDNAKNTVYLQMNSLKPEDTAVYYCAADPAIPAWGDYWGQGTQVTVSSQVQLVESGGGLVQAGGSLRLSCAASGFIFGRNAMGWYRQAPGKERELVAGITRRGSITYYADSVKGRFTISRDNAKNTVYLQMNSLKPEDTAVYYCAADPATPAPGDYWGQGTQVTVSSQVQLVESGGGLVQAGGSLRLSCAASGFIFGRNAMGWYRQAPGKERELVAGITRRGSITYYADSVKGRFTISRDNAKNTVYLQMNSLKPEDTAVYYCAADPATPAYGDYWGQGTQVTVSSQVQLVESGGGLVQAGGSLRLSCAASGFIFGRNAMGWYRQAPGKERELVAGITRRGSITYYADSVKGRFTISRDNAKNTVYLQMNSLKPEDTAVYYCAADPATPAFGDYWGQGTQVTVSSQVQLVESGGGLVQAGGSLRLSCAASGFIFGRNAMGWYRQAPGKERELVAGITRRGSITYYADSVKGRFTISRDNAKNTVYLQMNSLKPEDTAVYYCAADPATPAWGDYWGQGTQVTVSSQVQLVESGGGLVQAGGSLRLSCAASGFIFGRNAMGWYRQAPGKERELVAGITRRHSITYYADSVKGRFTISRDNAKNTVYLQMNSLKPEDTAVYYCAADPASPAPGDYWGQGTQVTVSSQVQLVESGGGLVQAGGSLRLSCAASGFIFGRNAMGWYRQAPGKERELVAGITRRHSITYYADSVKGRFTISRDNAKNTVYLQMNSLKPEDTAVYYCAADPASPAYGDYWGQGTQVTVSSQVQLVESGGGLVQAGGSLRLSCAASGFIFGRNAMGWYRQAPGKERELVAGITRRHSITYYADSVKGRFTISRDNAKNTVYLQMNSLKPEDTAVYYCAADPASPAFGDYWGQGTQVTVSS

SEQ ID NO: 597 - protein, 1904 aa, Artificial Sequence
  Synthetic sdABD sequence of MASC monomer
QVQLVESGGGLVQAGGSLRLSCAASGFIFGRNAMGWYRQAPGKERELVAGITRRHSITYYADSVKGRFTISRDNAKNTVYLQMNSLKPEDTAVYYCAADPASPAWGDYWGQGTQVTVSSQVQLVESGGGLVQAGGSLRLSCAASGFIFGRNAMGWYRQAPGKERELVAGITRRHSITYYADSVKGRFTISRDNAKNTVYLQMNSLKPEDTAVYYCAADPAVPAPGDYWGQGTQVTVSSQVQLVESGGGLVQAGGSLRLSCAASGFIFGRNAMGWYRQAPGKERELVAGITRRHSITYYADSVKGRFTISRDNAKNTVYLQMNSLKPEDTAVYYCAADPAVPAYGDYWGQGTQVTVSSQVQLVESGGGLVQAGGSLRLSCAASGFIFGRNAMGWYRQAPGKERELVAGITRRHSITYYADSVKGRFTISRDNAKNTVYLQMNSLKPEDTAVYYCAADPAVPAFGDYWGQGTQVTVSSQVQLVESGGGLVQAGGSLRLSCAASGFIFGRNAMGWYRQAPGKERELVAGITRRHSITYYADSVKGRFTISRDNAKNTVYLQMNSLKPEDTAVYYCAADPAVPAWGDYWGQGTQVTVSSQVQLVESGGGLVQAGGSLRLSCAASGFIFGRNAMGWYRQAPGKERELVAGITRRHSITYYADSVKGRFTISRDNAKNTVYLQMNSLKPEDTAVYYCAADPALPAPGDYWGQGTQVTVSSQVQLVESGGGLVQAGGSLRLSCAASGFIFGRNAMGWYRQAPGKERELVAGITRRHSITYYADSVKGRFTISRDNAKNTVYLQMNSLKPEDTAVYYCAADPALPAYGDYWGQGTQVTVSSQVQLVESGGGLVQAGGSLRLSCAASGFIFGRNAMGWYRQAPGKERELVAGITRRHSITYYADSVKGRFTISRDNAKNTVYLQMNSLKPEDTAVYYCAADPALPAFGDYWGQGTQVTVSSQVQLVESGGGLVQAGGSLRLSCAASGFIFGRNAMGWYRQAPGKERELVAGITRRHSITYYADSVKGRFTISRDNAKNTVYLQMNSLKPEDTAVYYCAADPALPAWGDYWGQGTQVTVSSQVQLVESGGGLVQAGGSLRLSCAASGFIFGRNAMGWYRQAPGKERELVAGITRRHSITYYADSVKGRFTISRDNAKNTVYLQMNSLKPEDTAVYYCAADPAIPAPGDYWGQGTQVTVSSQVQLVESGGGLVQAGGSLRLSCAASGFIFGRNAMGWYRQAPGKERELVAGITRRHSITYYADSVKGRFTISRDNAKNTVYLQMNSLKPEDTAVYYCAADPAIPAYGDYWGQGTQVTVSSQVQLVESGGGLVQAGGSLRLSCAASGFIFGRNAMGWYRQAPGKERELVAGITRRHSITYYADSVKGRFTISRDNAKNTVYLQMNSLKPEDTAVYYCAADPAIPAFGDYWGQGTQVTVSSQVQLVESGGGLVQAGGSLRLSCAASGFIFGRNAMGWYRQAPGKERELVAGITRRHSITYYADSVKGRFTISRDNAKNTVYLQMNSLKPEDTAVYYCAADPAIPAWGDYWGQGTQVTVSSQVQLVESGGGLVQAGGSLRLSCAASGFIFGRNAMGWYRQAPGKERELVAGITRRHSITYYADSVKGRFTISRDNAKNTVYLQMNSLKPEDTAVYYCAADPATPAPGDYWGQGTQVTVSSQVQLVESGGGLVQAGGSLRLSCAASGFIFGRNAMGWYRQAPGKERELVAGITRRHSITYYADSVKGRFTISRDNAKNTVYLQMNSLKPEDTAVYYCAADPATPAYGDYWGQGTQVTVSSQVQLVESGGGLVQAGGSLRLSCAASGFIFGRNAMGWYRQAPGKERELVAGITRRHSITYYADSVKGRFTISRDNAKNTVYLQMNSLKPEDTAVYYCAADPATPAFGDYWGQGTQVTVSS

SEQ ID NO: 598 - protein, 1904 aa, Artificial Sequence
  Synthetic sdABD sequence of MASC monomer
QVQLVESGGGLVQAGGSLRLSCAASGFIFGRNAMGWYRQAPGKERELVAGITRRHSITYYADSVKGRFTISRDNAKNTVYLQMNSLKPEDTAVYYCAADPATPAWGDYWGQGTQVTVSSQVQLVESGGGLVQAGGSLRLSCAASGFIFGRNAMGWYRQAPGKERELVAGITRRYSITYYADSVKGRFTISRDNAKNTVYLQMNSLKPEDTAVYYCAADPASPAPGDYWGQGTQVTVSSQVQLVESGGGLVQAGGSLRLSCAASGFIFGRNAMGWYRQAPGKERELVAGITRRYSITYYADSVKGRFTISRDNAKNTVYLQMNSLKPEDTAVYYCAADPASPAYGDYWGQGTQVTVSSQVQLVESGGGLVQAGGSLRLSCAASGFIFGRNAMGWYRQAPGKERELVAGITRRYSITYYADSVKGRFTISRDNAKNTVYLQMNSLKPEDTAVYYCAADPASPAFGDYWGQGTQVTVSSQVQLVESGGGLVQAGGSLRLSCAASGFIFGRNAMGWYRQAPGKERELVAGITRRYSITYYADSVKGRFTISRDNAKNTVYLQMNSLKPEDTAVYYCAADPASPAWGDYWGQGTQVTVSSQVQLVESGGGLVQAGGSLRLSCAASGFIFGRNAMGWYRQAPGKERELVAGITRRYSITYYADSVKGRFTISRDNAKNTVYLQMNSLKPEDTAVYYCAADPAVPAPGDYWGQGTQVTVSSQVQLVESGGGLVQAGGSLRLSCAASGFIFGRNAMGWYRQAPGKERELVAGITRRYSITYYADSVKGRFTISRDNAKNTVYLQMNSLKPEDTAVYYCAADPAVPAYGDYWGQGTQVTVSSQVQLVESGGGLVQAGGSLRLSCAASGFIFGRNAMGWYRQAPGKERELVAGITRRYSITYYADSVKGRFTISRDNAKNTVYLQMNSLKPEDTAVYYCAADPAVPAFGDYWGQGTQVTVSSQVQLVESGGGLVQAGGSLRLSCAASGFIFGRNAMGWYRQAPGKERELVAGITRRYSITYYADSVKGRFTISRDNAKNTVYLQMNSLKPEDTAVYYCAADPAVPAWGDYWGQGTQVTVSSQVQLVESGGGLVQAGGSLRLSCAASGFIFGRNAMGWYRQAPGKERELVAGITRRYSITYYADSVKGRFTISRDNAKNTVYLQMNSLKPEDTAVYYCAADPALPAPGDYWGQGTQVTVSSQVQLVESGGGLVQAGGSLRLSCAASGFIFGRNAMGWYRQAPGKERELVAGITRRYSITYYADSVKGRFTISRDNAKNTVYLQMNSLKPEDTAVYYCAADPALPAYGDYWGQGTQVTVSSQVQLVESGGGLVQAGGSLRLSCAASGFIFGRNAMGWYRQAPGKERELVAGITRRYSITYYADSVKGRFTISRDNAKNTVYLQMNSLKPEDTAVYYCAADPALPAFGDYWGQGTQVTVSSQVQLVESGGGLVQAGGSLRLSCAASGFIFGRNAMGWYRQAPGKERELVAGITRRYSITYYADSVKGRFTISRDNAKNTVYLQMNSLKPEDTAVYYCAADPALPAWGDYWGQGTQVTVSSQVQLVESGGGLVQAGGSLRLSCAASGFIFGRNAMGWYRQAPGKERELVAGITRRYSITYYADSVKGRFTISRDNAKNTVYLQMNSLKPEDTAVYYCAADPAIPAPGDYWGQGTQVTVSSQVQLVESGGGLVQAGGSLRLSCAASGFIFGRNAMGWYRQAPGKERELVAGITRRYSITYYADSVKGRFTISRDNAKNTVYLQMNSLKPEDTAVYYCAADPAIPAYGDYWGQGTQVTVSSQVQLVESGGGLVQAGGSLRLSCAASGFIFGRNAMGWYRQAPGKERELVAGITRRYSITYYADSVKGRFTISRDNAKNTVYLQMNSLKPEDTAVYYCAADPAIPAFGDYWGQGTQVTVSS

SEQ ID NO: 599 - protein, 1904 aa, Artificial Sequence
  Synthetic sdABD sequence of MASC monomer
QVQLVESGGGLVQAGGSLRLSCAASGFIFGRNAMGWYRQAPGKERELVAGITRRYSITYYADSVKGRFTISRDNAKNTVYLQMNSLKPEDTAVYYCAADPAIPAWGDYWGQGTQVTVSSQVQLVESGGGLVQAGGSLRLSCAASGFIFGRNAMGWYRQAPGKERELVAGITRRYSITYYADSVKGRFTISRDNAKNTVYLQMNSLKPEDTAVYYCAADPATPAPGDYWGQGTQVTVSSQVQLVESGGGLVQAGGSLRLSCAASGFIFGRNAMGWYRQAPGKERELVAGITRRYSITYYADSVKGRFTISRDNAKNTVYLQMNSLKPEDTAVYYCAADPATPAYGDYWGQGTQVTVSSQVQLVESGGGLVQAGGSLRLSCAASGFIFGRNAMGWYRQAPGKERELVAGITRRYSITYYADSVKGRFTISRDNAKNTVYLQMNSLKPEDTAVYYCAADPATPAFGDYWGQGTQVTVSSQVQLVESGGGLVQAGGSLRLSCAASGFIFGRNAMGWYRQAPGKERELVAGITRRYSITYYADSVKGRFTISRDNAKNTVYLQMNSLKPEDTAVYYCAADPATPAWGDYWGQGTQVTVSSQVQLVESGGGLVQAGGSLRLSCAASGFIFGRNAMGWYRQAPGKERELVAGITRRGSITYYADSVKGRFTISRDNAKNTVYLQMNSLKPEDTAVYYCAADPASPAPGDYWGQGTQVTVSSQVQLVESGGGLVQAGGSLRLSCAASGFIFGRNAMGWYRQAPGKERELVAGITRRGSITYYADSVKGRFTISRDNAKNTVYLQMNSLKPEDTAVYYCAADPASPAYGDYWGQGTQVTVSSQVQLVESGGGLVQAGGSLRLSCAASGFIFGRNAMGWYRQAPGKERELVAGITRRGSITYYADSVKGRFTISRDNAKNTVYLQMNSLKPEDTAVYYCAADPASPAFGDYWGQGTQVTVSSQVQLVESGGGLVQAGGSLRLSCAASGFIFGRNAMGWYRQAPGKERELVAGITRRGSITYYADSVKGRFTISRDNAKNTVYLQMNSLKPEDTAVYYCAADPASPAWGDYWGQGTQVTVSSQVQLVESGGGLVQAGGSLRLSCAASGFIFGRNAMGWYRQAPGKERELVAGITRRGSITYYADSVKGRFTISRDNAKNTVYLQMNSLKPEDTAVYYCAADPAVPAPGDYWGQGTQVTVSSQVQLVESGGGLVQAGGSLRLSCAASGFIFGRNAMGWYRQAPGKERELVAGITRRGSITYYADSVKGRFTISRDNAKNTVYLQMNSLKPEDTAVYYCAADPAVPAYGDYWGQGTQVTVSSQVQLVESGGGLVQAGGSLRLSCAASGFIFGRNAMGWYRQAPGKERELVAGITRRGSITYYADSVKGRFTISRDNAKNTVYLQMNSLKPEDTAVYYCAADPAVPAFGDYWGQGTQVTVSSQVQLVESGGGLVQAGGSLRLSCAASGFIFGRNAMGWYRQAPGKERELVAGITRRGSITYYADSVKGRFTISRDNAKNTVYLQMNSLKPEDTAVYYCAADPAVPAWGDYWGQGTQVTVSSQVQLVESGGGLVQAGGSLRLSCAASGFIFGRNAMGWYRQAPGKERELVAGITRRGSITYYADSVKGRFTISRDNAKNTVYLQMNSLKPEDTAVYYCAADPALPAPGDYWGQGTQVTVSSQVQLVESGGGLVQAGGSLRLSCAASGFIFGRNAMGWYRQAPGKERELVAGITRRGSITYYADSVKGRFTISRDNAKNTVYLQMNSLKPEDTAVYYCAADPALPAYGDYWGQGTQVTVSSQVQLVESGGGLVQAGGSLRLSCAASGFIFGRNAMGWYRQAPGKERELVAGITRRGSITYYADSVKGRFTISRDNAKNTVYLQMNSLKPEDTAVYYCAADPALPAFGDYWGQGTQVTVSS

SEQ ID NO: 600 - protein, 1904 aa, Artificial Sequence
  Synthetic sdABD sequence of MASC monomer
QVQLVESGGGLVQAGGSLRLSCAASGFIFGRNAMGWYRQAPGKERELVAGITRRGSITYYADSVKGRFTISRDNAKNTVYLQMNSLKPEDTAVYYCAADPALPAWGDYWGQGTQVTVSSQVQLVESGGGLVQAGGSLRLSCAASGFIFGRNAMGWYRQAPGKERELVAGITRRGSITYYADSVKGRFTISRDNAKNTVYLQMNSLKPEDTAVYYCAADPAIPAPGDYWGQGTQVTVSSQVQLVESGGGLVQAGGSLRLSCAASGFIFGRNAMGWYRQAPGKERELVAGITRRGSITYYADSVKGRFTISRDNAKNTVYLQMNSLKPEDTAVYYCAADPAIPAYGDYWGQGTQVTVSSQVQLVESGGGLVQAGGSLRLSCAASGFIFGRNAMGWYRQAPGKERELVAGITRRGSITYYADSVKGRFTISRDNAKNTVYLQMNSLKPEDTAVYYCAADPAIPAFGDYWGQGTQVTVSSQVQLVESGGGLVQAGGSLRLSCAASGFIFGRNAMGWYRQAPGKERELVAGITRRGSITYYADSVKGRFTISRDNAKNTVYLQMNSLKPEDTAVYYCAADPAIPAWGDYWGQGTQVTVSSQVQLVESGGGLVQAGGSLRLSCAASGFIFGRNAMGWYRQAPGKERELVAGITRRGSITYYADSVKGRFTISRDNAKNTVYLQMNSLKPEDTAVYYCAADPATPAPGDYWGQGTQVTVSSQVQLVESGGGLVQAGGSLRLSCAASGFIFGRNAMGWYRQAPGKERELVAGITRRGSITYYADSVKGRFTISRDNAKNTVYLQMNSLKPEDTAVYYCAADPATPAYGDYWGQGTQVTVSSQVQLVESGGGLVQAGGSLRLSCAASGFIFGRNAMGWYRQAPGKERELVAGITRRGSITYYADSVKGRFTISRDNAKNTVYLQMNSLKPEDTAVYYCAADPATPAFGDYWGQGTQVTVSSQVQLVESGGGLVQAGGSLRLSCAASGFIFGRNAMGWYRQAPGKERELVAGITRRGSITYYADSVKGRFTISRDNAKNTVYLQMNSLKPEDTAVYYCAADPATPAWGDYWGQGTQVTVSSQVQLVESGGGLVQAGGSLRLSCAASGFIFGRNAMGWYRQAPGKERELVAGITRRQSITYYADSVKGRFTISRDNAKNTVYLQMNSLKPEDTAVYYCAADPASPAPGDYWGQGTQVTVSSQVQLVESGGGLVQAGGSLRLSCAASGFIFGRNAMGWYRQAPGKERELVAGITRRQSITYYADSVKGRFTISRDNAKNTVYLQMNSLKPEDTAVYYCAADPASPAYGDYWGQGTQVTVSSQVQLVESGGGLVQAGGSLRLSCAASGFIFGRNAMGWYRQAPGKERELVAGITRRQSITYYADSVKGRFTISRDNAKNTVYLQMNSLKPEDTAVYYCAADPASPAFGDYWGQGTQVTVSSQVQLVESGGGLVQAGGSLRLSCAASGFIFGRNAMGWYRQAPGKERELVAGITRRQSITYYADSVKGRFTISRDNAKNTVYLQMNSLKPEDTAVYYCAADPASPAWGDYWGQGTQVTVSSQVQLVESGGGLVQAGGSLRLSCAASGFIFGRNAMGWYRQAPGKERELVAGITRRQSITYYADSVKGRFTISRDNAKNTVYLQMNSLKPEDTAVYYCAADPAVPAPGDYWGQGTQVTVSSQVQLVESGGGLVQAGGSLRLSCAASGFIFGRNAMGWYRQAPGKERELVAGITRRQSITYYADSVKGRFTISRDNAKNTVYLQMNSLKPEDTAVYYCAADPAVPAYGDYWGQGTQVTVSSQVQLVESGGGLVQAGGSLRLSCAASGFIFGRNAMGWYRQAPGKERELVAGITRRQSITYYADSVKGRFTISRDNAKNTVYLQMNSLKPEDTAVYYCAADPAVPAFGDYWGQGTQVTVSS

SEQ ID NO: 601 - protein, 1904 aa, Artificial Sequence
  Synthetic sdABD sequence of MASC monomer
QVQLVESGGGLVQAGGSLRLSCAASGFIFGRNAMGWYRQAPGKERELVAGITRRQSITYYADSVKGRFTISRDNAKNTVYLQMNSLKPEDTAVYYCAADPAVPAWGDYWGQGTQVTVSSQVQLVESGGGLVQAGGSLRLSCAASGFIFGRNAMGWYRQAPGKERELVAGITRRQSITYYADSVKGRFTISRDNAKNTVYLQMNSLKPEDTAVYYCAADPALPAPGDYWGQGTQVTVSSQVQLVESGGGLVQAGGSLRLSCAASGFIFGRNAMGWYRQAPGKERELVAGITRRQSITYYADSVKGRFTISRDNAKNTVYLQMNSLKPEDTAVYYCAADPALPAYGDYWGQGTQVTVSSQVQLVESGGGLVQAGGSLRLSCAASGFIFGRNAMGWYRQAPGKERELVAGITRRQSITYYADSVKGRFTISRDNAKNTVYLQMNSLKPEDTAVYYCAADPALPAFGDYWGQGTQVTVSSQVQLVESGGGLVQAGGSLRLSCAASGFIFGRNAMGWYRQAPGKERELVAGITRRQSITYYADSVKGRFTISRDNAKNTVYLQMNSLKPEDTAVYYCAADPALPAWGDYWGQGTQVTVSSQVQLVESGGGLVQAGGSLRLSCAASGFIFGRNAMGWYRQAPGKERELVAGITRRQSITYYADSVKGRFTISRDNAKNTVYLQMNSLKPEDTAVYYCAADPAIPAPGDYWGQGTQVTVSSQVQLVESGGGLVQAGGSLRLSCAASGFIFGRNAMGWYRQAPGKERELVAGITRRQSITYYADSVKGRFTISRDNAKNTVYLQMNSLKPEDTAVYYCAADPAIPAYGDYWGQGTQVTVSSQVQLVESGGGLVQAGGSLRLSCAASGFIFGRNAMGWYRQAPGKERELVAGITRRQSITYYADSVKGRFTISRDNAKNTVYLQMNSLKPEDTAVYYCAADPAIPAFGDYWGQGTQVTVSSQVQLVESGGGLVQAGGSLRLSCAASGFIFGRNAMGWYRQAPGKERELVAGITRRQSITYYADSVKGRFTISRDNAKNTVYLQMNSLKPEDTAVYYCAADPAIPAWGDYWGQGTQVTVSSQVQLVESGGGLVQAGGSLRLSCAASGFIFGRNAMGWYRQAPGKERELVAGITRRQSITYYADSVKGRFTISRDNAKNTVYLQMNSLKPEDTAVYYCAADPATPAPGDYWGQGTQVTVSSQVQLVESGGGLVQAGGSLRLSCAASGFIFGRNAMGWYRQAPGKERELVAGITRRQSITYYADSVKGRFTISRDNAKNTVYLQMNSLKPEDTAVYYCAADPATPAYGDYWGQGTQVTVSSQVQLVESGGGLVQAGGSLRLSCAASGFIFGRNAMGWYRQAPGKERELVAGITRRQSITYYADSVKGRFTISRDNAKNTVYLQMNSLKPEDTAVYYCAADPATPAFGDYWGQGTQVTVSSQVQLVESGGGLVQAGGSLRLSCAASGFIFGRNAMGWYRQAPGKERELVAGITRRQSITYYADSVKGRFTISRDNAKNTVYLQMNSLKPEDTAVYYCAADPATPAWGDYWGQGTQVTVSSQVQLVESGGGLVQAGGSLRLSCAASGLIFGRNAMGWYRQAPGKERELVAGITRRGSITYYADSVKGRFTISRDNAKNTVYLQMNSLKPEDTAVYYCAADPASPAPGDYWGQGTQVTVSSQVQLVESGGGLVQAGGSLRLSCAASGLIFGRNAMGWYRQAPGKERELVAGITRRGSITYYADSVKGRFTISRDNAKNTVYLQMNSLKPEDTAVYYCAADPASPAYGDYWGQGTQVTVSSQVQLVESGGGLVQAGGSLRLSCAASGLIFGRNAMGWYRQAPGKERELVAGITRRGSITYYADSVKGRFTISRDNAKNTVYLQMNSLKPEDTAVYYCAADPASPAFGDYWGQGTQVTVSS

SEQ ID NO: 602 - protein, 1904 aa, Artificial Sequence
  Synthetic sdABD sequence of MASC monomer
QVQLVESGGGLVQAGGSLRLSCAASGLIFGRNAMGWYRQAPGKERELVAGITRRGSITYYADSVKGRFTISRDNAKNTVYLQMNSLKPEDTAVYYCAADPASPAWGDYWGQGTQVTVSSQVQLVESGGGLVQAGGSLRLSCAASGLIFGRNAMGWYRQAPGKERELVAGITRRGSITYYADSVKGRFTISRDNAKNTVYLQMNSLKPEDTAVYYCAADPAVPAPGDYWGQGTQVTVSSQVQLVESGGGLVQAGGSLRLSCAASGLIFGRNAMGWYRQAPGKERELVAGITRRGSITYYADSVKGRFTISRDNAKNTVYLQMNSLKPEDTAVYYCAADPAVPAYGDYWGQGTQVTVSSQVQLVESGGGLVQAGGSLRLSCAASGLIFGRNAMGWYRQAPGKERELVAGITRRGSITYYADSVKGRFTISRDNAKNTVYLQMNSLKPEDTAVYYCAADPAVPAFGDYWGQGTQVTVSSQVQLVESGGGLVQAGGSLRLSCAASGLIFGRNAMGWYRQAPGKERELVAGITRRGSITYYADSVKGRFTISRDNAKNTVYLQMNSLKPEDTAVYYCAADPAVPAWGDYWGQGTQVTVSSQVQLVESGGGLVQAGGSLRLSCAASGLIFGRNAMGWYRQAPGKERELVAGITRRGSITYYADSVKGRFTISRDNAKNTVYLQMNSLKPEDTAVYYCAADPALPAPGDYWGQGTQVTVSSQVQLVESGGGLVQAGGSLRLSCAASGLIFGRNAMGWYRQAPGKERELVAGITRRGSITYYADSVKGRFTISRDNAKNTVYLQMNSLKPEDTAVYYCAADPALPAYGDYWGQGTQVTVSSQVQLVESGGGLVQAGGSLRLSCAASGLIFGRNAMGWYRQAPGKERELVAGITRRGSITYYADSVKGRFTISRDNAKNTVYLQMNSLKPEDTAVYYCAADPALPAFGDYWGQGTQVTVSSQVQLVESGGGLVQAGGSLRLSCAASGLIFGRNAMGWYRQAPGKERELVAGITRRGSITYYADSVKGRFTISRDNAKNTVYLQMNSLKPEDTAVYYCAADPALPAWGDYWGQGTQVTVSSQVQLVESGGGLVQAGGSLRLSCAASGLIFGRNAMGWYRQAPGKERELVAGITRRGSITYYADSVKGRFTISRDNAKNTVYLQMNSLKPEDTAVYYCAADPAIPAPGDYWGQGTQVTVSSQVQLVESGGGLVQAGGSLRLSCAASGLIFGRNAMGWYRQAPGKERELVAGITRRGSITYYADSVKGRFTISRDNAKNTVYLQMNSLKPEDTAVYYCAADPAIPAYGDYWGQGTQVTVSSQVQLVESGGGLVQAGGSLRLSCAASGLIFGRNAMGWYRQAPGKERELVAGITRRGSITYYADSVKGRFTISRDNAKNTVYLQMNSLKPEDTAVYYCAADPAIPAFGDYWGQGTQVTVSSQVQLVESGGGLVQAGGSLRLSCAASGLIFGRNAMGWYRQAPGKERELVAGITRRGSITYYADSVKGRFTISRDNAKNTVYLQMNSLKPEDTAVYYCAADPAIPAWGDYWGQGTQVTVSSQVQLVESGGGLVQAGGSLRLSCAASGLIFGRNAMGWYRQAPGKERELVAGITRRGSITYYADSVKGRFTISRDNAKNTVYLQMNSLKPEDTAVYYCAADPATPAPGDYWGQGTQVTVSSQVQLVESGGGLVQAGGSLRLSCAASGLIFGRNAMGWYRQAPGKERELVAGITRRGSITYYADSVKGRFTISRDNAKNTVYLQMNSLKPEDTAVYYCAADPATPAYGDYWGQGTQVTVSSQVQLVESGGGLVQAGGSLRLSCAASGLIFGRNAMGWYRQAPGKERELVAGITRRGSITYYADSVKGRFTISRDNAKNTVYLQMNSLKPEDTAVYYCAADPATPAFGDYWGQGTQVTVSS

SEQ ID NO: 603 - protein, 1904 aa, Artificial Sequence
  Synthetic sdABD sequence of MASC monomer
QVQLVESGGGLVQAGGSLRLSCAASGLIFGRNAMGWYRQAPGKERELVAGITRRGSITYYADSVKGRFTISRDNAKNTVYLQMNSLKPEDTAVYYCAADPATPAWGDYWGQGTQVTVSSQVQLVESGGGLVQAGGSLRLSCAASGLIFGRNAMGWYRQAPGKERELVAGITRRHSITYYADSVKGRFTISRDNAKNTVYLQMNSLKPEDTAVYYCAADPASPAPGDYWGQGTQVTVSSQVQLVESGGGLVQAGGSLRLSCAASGLIFGRNAMGWYRQAPGKERELVAGITRRHSITYYADSVKGRFTISRDNAKNTVYLQMNSLKPEDTAVYYCAADPASPAYGDYWGQGTQVTVSSQVQLVESGGGLVQAGGSLRLSCAASGLIFGRNAMGWYRQAPGKERELVAGITRRHSITYYADSVKGRFTISRDNAKNTVYLQMNSLKPEDTAVYYCAADPASPAFGDYWGQGTQVTVSSQVQLVESGGGLVQAGGSLRLSCAASGLIFGRNAMGWYRQAPGKERELVAGITRRHSITYYADSVKGRFTISRDNAKNTVYLQMNSLKPEDTAVYYCAADPASPAWGDYWGQGTQVTVSSQVQLVESGGGLVQAGGSLRLSCAASGLIFGRNAMGWYRQAPGKERELVAGITRRHSITYYADSVKGRFTISRDNAKNTVYLQMNSLKPEDTAVYYCAADPAVPAPGDYWGQGTQVTVSSQVQLVESGGGLVQAGGSLRLSCAASGLIFGRNAMGWYRQAPGKERELVAGITRRHSITYYADSVKGRFTISRDNAKNTVYLQMNSLKPEDTAVYYCAADPAVPAYGDYWGQGTQVTVSSQVQLVESGGGLVQAGGSLRLSCAASGLIFGRNAMGWYRQAPGKERELVAGITRRHSITYYADSVKGRFTISRDNAKNTVYLQMNSLKPEDTAVYYCAADPAVPAFGDYWGQGTQVTVSSQVQLVESGGGLVQAGGSLRLSCAASGLIFGRNAMGWYRQAPGKERELVAGITRRHSITYYADSVKGRFTISRDNAKNTVYLQMNSLKPEDTAVYYCAADPAVPAWGDYWGQGTQVTVSSQVQLVESGGGLVQAGGSLRLSCAASGLIFGRNAMGWYRQAPGKERELVAGITRRHSITYYADSVKGRFTISRDNAKNTVYLQMNSLKPEDTAVYYCAADPALPAPGDYWGQGTQVTVSSQVQLVESGGGLVQAGGSLRLSCAASGLIFGRNAMGWYRQAPGKERELVAGITRRHSITYYADSVKGRFTISRDNAKNTVYLQMNSLKPEDTAVYYCAADPALPAYGDYWGQGTQVTVSSQVQLVESGGGLVQAGGSLRLSCAASGLIFGRNAMGWYRQAPGKERELVAGITRRHSITYYADSVKGRFTISRDNAKNTVYLQMNSLKPEDTAVYYCAADPALPAFGDYWGQGTQVTVSSQVQLVESGGGLVQAGGSLRLSCAASGLIFGRNAMGWYRQAPGKERELVAGITRRHSITYYADSVKGRFTISRDNAKNTVYLQMNSLKPEDTAVYYCAADPALPAWGDYWGQGTQVTVSSQVQLVESGGGLVQAGGSLRLSCAASGLIFGRNAMGWYRQAPGKERELVAGITRRHSITYYADSVKGRFTISRDNAKNTVYLQMNSLKPEDTAVYYCAADPAIPAPGDYWGQGTQVTVSSQVQLVESGGGLVQAGGSLRLSCAASGLIFGRNAMGWYRQAPGKERELVAGITRRHSITYYADSVKGRFTISRDNAKNTVYLQMNSLKPEDTAVYYCAADPAIPAYGDYWGQGTQVTVSSQVQLVESGGGLVQAGGSLRLSCAASGLIFGRNAMGWYRQAPGKERELVAGITRRHSITYYADSVKGRFTISRDNAKNTVYLQMNSLKPEDTAVYYCAADPAIPAFGDYWGQGTQVTVSS

SEQ ID NO: 604 - protein, 1904 aa, Artificial Sequence
  Synthetic sdABD sequence of MASC monomer
QVQLVESGGGLVQAGGSLRLSCAASGLIFGRNAMGWYRQAPGKERELVAGITRRHSITYYADSVKGRFTISRDNAKNTVYLQMNSLKPEDTAVYYCAADPAIPAWGDYWGQGTQVTVSSQVQLVESGGGLVQAGGSLRLSCAASGLIFGRNAMGWYRQAPGKERELVAGITRRHSITYYADSVKGRFTISRDNAKNTVYLQMNSLKPEDTAVYYCAADPATPAPGDYWGQGTQVTVSSQVQLVESGGGLVQAGGSLRLSCAASGLIFGRNAMGWYRQAPGKERELVAGITRRHSITYYADSVKGRFTISRDNAKNTVYLQMNSLKPEDTAVYYCAADPATPAYGDYWGQGTQVTVSSQVQLVESGGGLVQAGGSLRLSCAASGLIFGRNAMGWYRQAPGKERELVAGITRRHSITYYADSVKGRFTISRDNAKNTVYLQMNSLKPEDTAVYYCAADPATPAFGDYWGQGTQVTVSSQVQLVESGGGLVQAGGSLRLSCAASGLIFGRNAMGWYRQAPGKERELVAGITRRHSITYYADSVKGRFTISRDNAKNTVYLQMNSLKPEDTAVYYCAADPATPAWGDYWGQGTQVTVSSQVQLVESGGGLVQAGGSLRLSCAASGLIFGRNAMGWYRQAPGKERELVAGITRRYSITYYADSVKGRFTISRDNAKNTVYLQMNSLKPEDTAVYYCAADPASPAPGDYWGQGTQVTVSSQVQLVESGGGLVQAGGSLRLSCAASGLIFGRNAMGWYRQAPGKERELVAGITRRYSITYYADSVKGRFTISRDNAKNTVYLQMNSLKPEDTAVYYCAADPASPAYGDYWGQGTQVTVSSQVQLVESGGGLVQAGGSLRLSCAASGLIFGRNAMGWYRQAPGKERELVAGITRRYSITYYADSVKGRFTISRDNAKNTVYLQMNSLKPEDTAVYYCAADPASPAFGDYWGQGTQVTVSSQVQLVESGGGLVQAGGSLRLSCAASGLIFGRNAMGWYRQAPGKERELVAGITRRYSITYYADSVKGRFTISRDNAKNTVYLQMNSLKPEDTAVYYCAADPASPAWGDYWGQGTQVTVSSQVQLVESGGGLVQAGGSLRLSCAASGLIFGRNAMGWYRQAPGKERELVAGITRRYSITYYADSVKGRFTISRDNAKNTVYLQMNSLKPEDTAVYYCAADPAVPAPGDYWGQGTQVTVSSQVQLVESGGGLVQAGGSLRLSCAASGLIFGRNAMGWYRQAPGKERELVAGITRRYSITYYADSVKGRFTISRDNAKNTVYLQMNSLKPEDTAVYYCAADPAVPAYGDYWGQGTQVTVSSQVQLVESGGGLVQAGGSLRLSCAASGLIFGRNAMGWYRQAPGKERELVAGITRRYSITYYADSVKGRFTISRDNAKNTVYLQMNSLKPEDTAVYYCAADPAVPAFGDYWGQGTQVTVSSQVQLVESGGGLVQAGGSLRLSCAASGLIFGRNAMGWYRQAPGKERELVAGITRRYSITYYADSVKGRFTISRDNAKNTVYLQMNSLKPEDTAVYYCAADPAVPAWGDYWGQGTQVTVSSQVQLVESGGGLVQAGGSLRLSCAASGLIFGRNAMGWYRQAPGKERELVAGITRRYSITYYADSVKGRFTISRDNAKNTVYLQMNSLKPEDTAVYYCAADPALPAPGDYWGQGTQVTVSSQVQLVESGGGLVQAGGSLRLSCAASGLIFGRNAMGWYRQAPGKERELVAGITRRYSITYYADSVKGRFTISRDNAKNTVYLQMNSLKPEDTAVYYCAADPALPAYGDYWGQGTQVTVSSQVQLVESGGGLVQAGGSLRLSCAASGLIFGRNAMGWYRQAPGKERELVAGITRRYSITYYADSVKGRFTISRDNAKNTVYLQMNSLKPEDTAVYYCAADPALPAFGDYWGQGTQVTVSS

SEQ ID NO: 605 - protein, 1904 aa, Artificial Sequence
  Synthetic sdABD sequence of MASC monomer
QVQLVESGGGLVQAGGSLRLSCAASGLIFGRNAMGWYRQAPGKERELVAGITRRYSITYYADSVKGRFTISRDNAKNTVYLQMNSLKPEDTAVYYCAADPALPAWGDYWGQGTQVTVSSQVQLVESGGGLVQAGGSLRLSCAASGLIFGRNAMGWYRQAPGKERELVAGITRRYSITYYADSVKGRFTISRDNAKNTVYLQMNSLKPEDTAVYYCAADPAIPAPGDYWGQGTQVTVSSQVQLVESGGGLVQAGGSLRLSCAASGLIFGRNAMGWYRQAPGKERELVAGITRRYSITYYADSVKGRFTISRDNAKNTVYLQMNSLKPEDTAVYYCAADPAIPAYGDYWGQGTQVTVSSQVQLVESGGGLVQAGGSLRLSCAASGLIFGRNAMGWYRQAPGKERELVAGITRRYSITYYADSVKGRFTISRDNAKNTVYLQMNSLKPEDTAVYYCAADPAIPAFGDYWGQGTQVTVSSQVQLVESGGGLVQAGGSLRLSCAASGLIFGRNAMGWYRQAPGKERELVAGITRRYSITYYADSVKGRFTISRDNAKNTVYLQMNSLKPEDTAVYYCAADPAIPAWGDYWGQGTQVTVSSQVQLVESGGGLVQAGGSLRLSCAASGLIFGRNAMGWYRQAPGKERELVAGITRRYSITYYADSVKGRFTISRDNAKNTVYLQMNSLKPEDTAVYYCAADPATPAPGDYWGQGTQVTVSSQVQLVESGGGLVQAGGSLRLSCAASGLIFGRNAMGWYRQAPGKERELVAGITRRYSITYYADSVKGRFTISRDNAKNTVYLQMNSLKPEDTAVYYCAADPATPAYGDYWGQGTQVTVSSQVQLVESGGGLVQAGGSLRLSCAASGLIFGRNAMGWYRQAPGKERELVAGITRRYSITYYADSVKGRFTISRDNAKNTVYLQMNSLKPEDTAVYYCAADPATPAFGDYWGQGTQVTVSSQVQLVESGGGLVQAGGSLRLSCAASGLIFGRNAMGWYRQAPGKERELVAGITRRYSITYYADSVKGRFTISRDNAKNTVYLQMNSLKPEDTAVYYCAADPATPAWGDYWGQGTQVTVSSQVQLVESGGGLVQAGGSLRLSCAASGLIFGRNAMGWYRQAPGKERELVAGITRRGSITYYADSVKGRFTISRDNAKNTVYLQMNSLKPEDTAVYYCAADPASPAPGDYWGQGTQVTVSSQVQLVESGGGLVQAGGSLRLSCAASGLIFGRNAMGWYRQAPGKERELVAGITRRGSITYYADSVKGRFTISRDNAKNTVYLQMNSLKPEDTAVYYCAADPASPAYGDYWGQGTQVTVSSQVQLVESGGGLVQAGGSLRLSCAASGLIFGRNAMGWYRQAPGKERELVAGITRRGSITYYADSVKGRFTISRDNAKNTVYLQMNSLKPEDTAVYYCAADPASPAFGDYWGQGTQVTVSSQVQLVESGGGLVQAGGSLRLSCAASGLIFGRNAMGWYRQAPGKERELVAGITRRGSITYYADSVKGRFTISRDNAKNTVYLQMNSLKPEDTAVYYCAADPASPAWGDYWGQGTQVTVSSQVQLVESGGGLVQAGGSLRLSCAASGLIFGRNAMGWYRQAPGKERELVAGITRRGSITYYADSVKGRFTISRDNAKNTVYLQMNSLKPEDTAVYYCAADPAVPAPGDYWGQGTQVTVSSQVQLVESGGGLVQAGGSLRLSCAASGLIFGRNAMGWYRQAPGKERELVAGITRRGSITYYADSVKGRFTISRDNAKNTVYLQMNSLKPEDTAVYYCAADPAVPAYGDYWGQGTQVTVSSQVQLVESGGGLVQAGGSLRLSCAASGLIFGRNAMGWYRQAPGKERELVAGITRRGSITYYADSVKGRFTISRDNAKNTVYLQMNSLKPEDTAVYYCAADPAVPAFGDYWGQGTQVTVSS

SEQ ID NO: 606 - protein, 1904 aa, Artificial Sequence
  Synthetic sdABD sequence of MASC monomer
QVQLVESGGGLVQAGGSLRLSCAASGLIFGRNAMGWYRQAPGKERELVAGITRRGSITYYADSVKGRFTISRDNAKNTVYLQMNSLKPEDTAVYYCAADPAVPAWGDYWGQGTQVTVSSQVQLVESGGGLVQAGGSLRLSCAASGLIFGRNAMGWYRQAPGKERELVAGITRRGSITYYADSVKGRFTISRDNAKNTVYLQMNSLKPEDTAVYYCAADPALPAPGDYWGQGTQVTVSSQVQLVESGGGLVQAGGSLRLSCAASGLIFGRNAMGWYRQAPGKERELVAGITRRGSITYYADSVKGRFTISRDNAKNTVYLQMNSLKPEDTAVYYCAADPALPAYGDYWGQGTQVTVSSQVQLVESGGGLVQAGGSLRLSCAASGLIFGRNAMGWYRQAPGKERELVAGITRRGSITYYADSVKGRFTISRDNAKNTVYLQMNSLKPEDTAVYYCAADPALPAFGDYWGQGTQVTVSSQVQLVESGGGLVQAGGSLRLSCAASGLIFGRNAMGWYRQAPGKERELVAGITRRGSITYYADSVKGRFTISRDNAKNTVYLQMNSLKPEDTAVYYCAADPALPAWGDYWGQGTQVTVSSQVQLVESGGGLVQAGGSLRLSCAASGLIFGRNAMGWYRQAPGKERELVAGITRRGSITYYADSVKGRFTISRDNAKNTVYLQMNSLKPEDTAVYYCAADPAIPAPGDYWGQGTQVTVSSQVQLVESGGGLVQAGGSLRLSCAASGLIFGRNAMGWYRQAPGKERELVAGITRRGSITYYADSVKGRFTISRDNAKNTVYLQMNSLKPEDTAVYYCAADPAIPAYGDYWGQGTQVTVSSQVQLVESGGGLVQAGGSLRLSCAASGLIFGRNAMGWYRQAPGKERELVAGITRRGSITYYADSVKGRFTISRDNAKNTVYLQMNSLKPEDTAVYYCAADPAIPAFGDYWGQGTQVTVSSQVQLVESGGGLVQAGGSLRLSCAASGLIFGRNAMGWYRQAPGKERELVAGITRRGSITYYADSVKGRFTISRDNAKNTVYLQMNSLKPEDTAVYYCAADPAIPAWGDYWGQGTQVTVSSQVQLVESGGGLVQAGGSLRLSCAASGLIFGRNAMGWYRQAPGKERELVAGITRRGSITYYADSVKGRFTISRDNAKNTVYLQMNSLKPEDTAVYYCAADPATPAPGDYWGQGTQVTVSSQVQLVESGGGLVQAGGSLRLSCAASGLIFGRNAMGWYRQAPGKERELVAGITRRGSITYYADSVKGRFTISRDNAKNTVYLQMNSLKPEDTAVYYCAADPATPAYGDYWGQGTQVTVSSQVQLVESGGGLVQAGGSLRLSCAASGLIFGRNAMGWYRQAPGKERELVAGITRRGSITYYADSVKGRFTISRDNAKNTVYLQMNSLKPEDTAVYYCAADPATPAFGDYWGQGTQVTVSSQVQLVESGGGLVQAGGSLRLSCAASGLIFGRNAMGWYRQAPGKERELVAGITRRGSITYYADSVKGRFTISRDNAKNTVYLQMNSLKPEDTAVYYCAADPATPAWGDYWGQGTQVTVSSQVQLVESGGGLVQAGGSLRLSCAASGLIFGRNAMGWYRQAPGKERELVAGITRRQSITYYADSVKGRFTISRDNAKNTVYLQMNSLKPEDTAVYYCAADPASPAPGDYWGQGTQVTVSSQVQLVESGGGLVQAGGSLRLSCAASGLIFGRNAMGWYRQAPGKERELVAGITRRQSITYYADSVKGRFTISRDNAKNTVYLQMNSLKPEDTAVYYCAADPASPAYGDYWGQGTQVTVSSQVQLVESGGGLVQAGGSLRLSCAASGLIFGRNAMGWYRQAPGKERELVAGITRRQSITYYADSVKGRFTISRDNAKNTVYLQMNSLKPEDTAVYYCAADPASPAFGDYWGQGTQVTVSS

SEQ ID NO: 607 - protein, 1904 aa, Artificial Sequence
  Synthetic sdABD sequence of MASC monomer
QVQLVESGGGLVQAGGSLRLSCAASGLIFGRNAMGWYRQAPGKERELVAGITRRQSITYYADSVKGRFTISRDNAKNTVYLQMNSLKPEDTAVYYCAADPASPAWGDYWGQGTQVTVSSQVQLVESGGGLVQAGGSLRLSCAASGLIFGRNAMGWYRQAPGKERELVAGITRRQSITYYADSVKGRFTISRDNAKNTVYLQMNSLKPEDTAVYYCAADPAVPAPGDYWGQGTQVTVSSQVQLVESGGGLVQAGGSLRLSCAASGLIFGRNAMGWYRQAPGKERELVAGITRRQSITYYADSVKGRFTISRDNAKNTVYLQMNSLKPEDTAVYYCAADPAVPAYGDYWGQGTQVTVSSQVQLVESGGGLVQAGGSLRLSCAASGLIFGRNAMGWYRQAPGKERELVAGITRRQSITYYADSVKGRFTISRDNAKNTVYLQMNSLKPEDTAVYYCAADPAVPAFGDYWGQGTQVTVSSQVQLVESGGGLVQAGGSLRLSCAASGLIFGRNAMGWYRQAPGKERELVAGITRRQSITYYADSVKGRFTISRDNAKNTVYLQMNSLKPEDTAVYYCAADPAVPAWGDYWGQGTQVTVSSQVQLVESGGGLVQAGGSLRLSCAASGLIFGRNAMGWYRQAPGKERELVAGITRRQSITYYADSVKGRFTISRDNAKNTVYLQMNSLKPEDTAVYYCAADPALPAPGDYWGQGTQVTVSSQVQLVESGGGLVQAGGSLRLSCAASGLIFGRNAMGWYRQAPGKERELVAGITRRQSITYYADSVKGRFTISRDNAKNTVYLQMNSLKPEDTAVYYCAADPALPAYGDYWGQGTQVTVSSQVQLVESGGGLVQAGGSLRLSCAASGLIFGRNAMGWYRQAPGKERELVAGITRRQSITYYADSVKGRFTISRDNAKNTVYLQMNSLKPEDTAVYYCAADPALPAFGDYWGQGTQVTVSSQVQLVESGGGLVQAGGSLRLSCAASGLIFGRNAMGWYRQAPGKERELVAGITRRQSITYYADSVKGRFTISRDNAKNTVYLQMNSLKPEDTAVYYCAADPALPAWGDYWGQGTQVTVSSQVQLVESGGGLVQAGGSLRLSCAASGLIFGRNAMGWYRQAPGKERELVAGITRRQSITYYADSVKGRFTISRDNAKNTVYLQMNSLKPEDTAVYYCAADPAIPAPGDYWGQGTQVTVSSQVQLVESGGGLVQAGGSLRLSCAASGLIFGRNAMGWYRQAPGKERELVAGITRRQSITYYADSVKGRFTISRDNAKNTVYLQMNSLKPEDTAVYYCAADPAIPAYGDYWGQGTQVTVSSQVQLVESGGGLVQAGGSLRLSCAASGLIFGRNAMGWYRQAPGKERELVAGITRRQSITYYADSVKGRFTISRDNAKNTVYLQMNSLKPEDTAVYYCAADPAIPAFGDYWGQGTQVTVSSQVQLVESGGGLVQAGGSLRLSCAASGLIFGRNAMGWYRQAPGKERELVAGITRRQSITYYADSVKGRFTISRDNAKNTVYLQMNSLKPEDTAVYYCAADPAIPAWGDYWGQGTQVTVSSQVQLVESGGGLVQAGGSLRLSCAASGLIFGRNAMGWYRQAPGKERELVAGITRRQSITYYADSVKGRFTISRDNAKNTVYLQMNSLKPEDTAVYYCAADPATPAPGDYWGQGTQVTVSSQVQLVESGGGLVQAGGSLRLSCAASGLIFGRNAMGWYRQAPGKERELVAGITRRQSITYYADSVKGRFTISRDNAKNTVYLQMNSLKPEDTAVYYCAADPATPAYGDYWGQGTQVTVSSQVQLVESGGGLVQAGGSLRLSCAASGLIFGRNAMGWYRQAPGKERELVAGITRRQSITYYADSVKGRFTISRDNAKNTVYLQMNSLKPEDTAVYYCAADPATPAFGDYWGQGTQVTVSS

SEQ ID NO: 608 - protein, 119 aa, Artificial Sequence
  Synthetic sdABD sequence of MASC monomer
QVQLVESGGGLVQAGGSLRLSCAASGLIFGRNAMGWYRQAPGKERELVAGITRRQSITYYADSVKGRFTISRDNAKNTVYLQMNSLKPEDTAVYYCAADPATPAWGDYWGQGTQVTVSS

SEQ ID NO: 609 - protein, 1286 aa, Artificial Sequence
  Synthetic protein Spike antigen
MFVFLVLLPLVSSQCVNLTTRTQLPPAYTNSFTRGVYYPDKVFRSSVLHSTQDLFLPFFSNVTWFHAIHVSGTNGTKRFDNPVLPFNDGVYFASTEKSNIIRGWIFGTTLDSKTQSLLTVNNATNVVIKVCEFQFCNDPFLGVYYHKNNKSWMESEFRVYSSANNCTFEYVSQPFLMDLEGKQGNFKNLREFVFKNIDGYFKIYSKHTPINLVRDLPQGFSALEPLVDLPIGINITRFQTLLALHRSYLTPGDSSSGWTAGAAAYYVGYLQPRTFLLKYNENGTITDAVDCALDPLSETKCTLKSFTVEKGIYQTSNFRVQPTESIVRFPNITNLCPFGEVFNATRFASVYAWNRKRISNCVADYSVLYNSASFSTFKCYGVSPTKLNDLCFTNVYADSFVIRGDEVRQIAPGQTGKIADYNYKLPDDFTGCVIAWNSNNLDSKVGGNYNYLYRLFRKSNLKPFERDISTELYQAGSTPCNGVEGFNCYFPLQSYGFQPTNGVGYQPYRVVVLSFELLHAPATVCGPKKSTNLVKNKCVNFNFNGLTGTGVLTESNKKFLPFQQFGRDIADTTDAVRDPQTLEILDITPCSFGGVSVITPGTNTSNQVAVLYQDVNCTEVPVAIHADQLTPTWRVYSTGSNVFQTRAGCLIAEHVNNSYECDIPIGAGICASYQTQTNSPGSASSVASQSIIAYTMSLGAENSVAYSNNSIAIPTNFTISVTTEILPVSMTKTSVDCTMYICGDSTECSNLLLQYGSFCTQLNRALTGIAVEQDKNTQEVFAQVKQIYKTPPIKDFGGFNFSQILPDPSKPSKRSFIEDLLFNKVTLADAGFIKQYGDCLGDIAARDLICAQKFNGLTVLPPLLTDEMIAQYTSALLAGTITSGWTFGAGAALQIPFAMQMAYRFNGLGVTQNVLYENQKIANQFNSIAGKTQDSLSSTASALGKLQDVVNQNAQALNTLVKQLSSNFGATSSVLNDTLSRLDPPEAEVQTDRLITGRLQSLQTYVTQQLIRAAELRASANLAATKMSECVLGQSKRVDFCGKGYHLMSFPQSAPHGVVFLHVTYVPAQEKNFTTAPAICHDGKAHFPREGVFVSNGTHWFVTQRNFYEPQIITTDNTFVSGNCDVVIGIVNNTVYDPLQPELDSFKEELDKYFKNHTSPDVDLGDISGINASVVNIQKEIDRLNEVAKNLNESLIDLQELGKYEQGSGYIPEAPRDGQAYVRKDGEWVLLSTFLGRSLEVLFQGPGHHHHHHHHSAWSHPQFEKGGGSGGGGSGGSAWSHPQFEK

SEQ ID NO: 610 - protein, 597 aa, Homo sapiens
QSTIEEQAKTFLDKFNHEAEDLFYQSSLASWNYNTNITEENVQNMNNAGDKWSAFLKEQSTLAQMYPLEQEIQNLTVKLQLQALQQNGSSVLSEDKSKRLNTILMTMSTIYSTGKVCNPDNPQECLLLEPGLNEIMANSLDYNERLWAWESWRSEVGKQLRPLYEEYVVLKNEMARANHYEDYGDYWRGDYEVNGVDGYDYSRGQLIEDVEHTFEEIKPLYEHLHAYVRAKLMNAYPSYISPIGCLPAHLLGDMWGRFWTNLYSLTVPFGQKPNIDVTDAMVDQAWDAQRIFKEAEKFFVSVGLPNMTQGFWENSMLTDPGNVQKAVCHPTAWDLGKGDFRILMCTKVTMDDFLTAGGEMGHIQYDMAYAAQPFLLRNGANEGFHEAVGEIMSLSAATPKHLKSIGLLSPDFQEDETEINFLLKQALTIVGTLPFTYMLEKWRWMVFKGEIPKDQWMKKWWEMKREIVGVVEPVPHDETYCDPASLFHVSNDYSFIRYYTRTLYQFQFQEALCQAAKHEGPLHKCDISNSTEAGQKLFNMLRLGKSEPWTLALENVVGAKNMNVRPLLNYFEPLFTWLKDQNKNSFVGWSTDWSPYA

SEQ ID NO: 611 - protein, 119 aa, Artificial Sequence; identical to SEQ ID NO: 87
  Synthetic sequence of highlighted MASC protein

SEQ ID NO: 612 - protein, 253 aa, Artificial Sequence
  Synthetic sequence of highlighted MASC protein
QVQLVESGGGLVQAGGSLRLSCAASGIIFGRNAMGWYRQAPGKERELVAGITRRGSITYYADSVKGRFTISRDNAKNTVYLQMNSLKPEDTAVYYCAADPASPAPGDYWGQGTQVTVSSGGGGSGGGGSGGGGSQVQLVESGGGLVQAGGSLRLSCAASGIIFGRNAMGWYRQAPGKERELVAGITRRGSITYYADSVKGRFTISRDNAKNTVYLQMNSLKPEDTAVYYCAADPASPAPGDYWGQGTQVTVSS

SEQ ID NO: 613 - protein, 258 aa, Artificial Sequence
  Synthetic sequence of highlighted MASC protein
QVQLVESGGGLVQAGGSLRLSCAASGIIFGRNAMGWYRQAPGKERELVAGITRRGSITYYADSVKGRFTISRDNAKNTVYLQMNSLKPEDTAVYYCAADPASPAPGDYWGQGTQVTVSSGGGGSGGGGSGGGGSGGGGSQVQLVESGGGLVQAGGSLRLSCAASGIIFGRNAMGWYRQAPGKERELVAGITRRGSITYYADSVKGRFTISRDNAKNTVYLQMNSLKPEDTAVYYCAADPASPAPGDYWGQGTQVTVSS

SEQ ID NO: 614 - protein, 387 aa, Artificial Sequence
  Synthetic sequence of highlighted MASC protein
QVQLVESGGGLVQAGGSLRLSCAASGIIFGRNAMGWYRQAPGKERELVAGITRRGSITYYADSVKGRFTISRDNAKNTVYLQMNSLKPEDTAVYYCAADPASPAPGDYWGQGTQVTVSSGGGGSGGGGSGGGGSQVQLVESGGGLVQAGGSLRLSCAASGIIFGRNAMGWYRQAPGKERELVAGITRRGSITYYADSVKGRFTISRDNAKNTVYLQMNSLKPEDTAVYYCAADPASPAPGDYWGQGTQVTVSSGGGGSGGGGSGGGGSQVQLVESGGGLVQAGGSLRLSCAASGIIFGRNAMGWYRQAPGKERELVAGITRRGSITYYADSVKGRFTISRDNAKNTVYLQMNSLKPEDTAVYYCAADPASPAPGDYWGQGTQVTVSS

SEQ ID NO: 615 - protein, 397 aa, Artificial Sequence
  Synthetic sequence of highlighted MASC protein
QVQLVESGGGLVQAGGSLRLSCAASGIIFGRNAMGWYRQAPGKERELVAGITRRGSITYYADSVKGRFTISRDNAKNTVYLQMNSLKPEDTAVYYCAADPASPAPGDYWGQGTQVTVSSGGGGSGGGGSGGGGSGGGGSQVQLVESGGGLVQAGGSLRLSCAASGIIFGRNAMGWYRQAPGKERELVAGITRRGSITYYADSVKGRFTISRDNAKNTVYLQMNSLKPEDTAVYYCAADPASPAPGDYWGQGTQVTVSSGGGGSGGGGSGGGGSGGGGSQVQLVESGGGLVQAGGSLRLSCAASGIIFGRNAMGWYRQAPGKERELVAGITRRGSITYYADSVKGRFTISRDNAKNTVYLQMNSLKPEDTAVYYCAADPASPAPGDYWGQGTQVTVSS

SEQ ID NO: 616 - protein, 119 aa, Artificial Sequence; identical to SEQ ID NO: 91
  Synthetic sequence of highlighted MASC protein

SEQ ID NO: 617 - protein, 253 aa, Artificial Sequence
  Synthetic sequence of highlighted MASC protein
QVQLVESGGGLVQAGGSLRLSCAASGYIFGRNAMGWYRQAPGKERELVAGITRRGSITYYADSVKGRFTISRDNAKNTVYLQMNSLKPEDTAVYYCAADPASPAYGDYWGQGTQVTVSSGGGGSGGGGSGGGGSQVQLVESGGGLVQAGGSLRLSCAASGYIFGRNAMGWYRQAPGKERELVAGITRRGSITYYADSVKGRFTISRDNAKNTVYLQMNSLKPEDTAVYYCAADPASPAYGDYWGQGTQVTVSS

SEQ ID NO: 618 - protein, 258 aa, Artificial Sequence
  Synthetic sequence of highlighted MASC protein
QVQLVESGGGLVQAGGSLRLSCAASGYIFGRNAMGWYRQAPGKERELVAGITRRGSITYYADSVKGRFTISRDNAKNTVYLQMNSLKPEDTAVYYCAADPASPAYGDYWGQGTQVTVSSGGGGSGGGGSGGGGSGGGGSQVQLVESGGGLVQAGGSLRLSCAASGYIFGRNAMGWYRQAPGKERELVAGITRRGSITYYADSVKGRFTISRDNAKNTVYLQMNSLKPEDTAVYYCAADPASPAYGDYWGQGTQVTVSS

SEQ ID NO: 619 - protein, 387 aa, Artificial Sequence
  Synthetic sequence of highlighted MASC protein
QVQLVESGGGLVQAGGSLRLSCAASGYIFGRNAMGWYRQAPGKERELVAGITRRGSITYYADSVKGRFTISRDNAKNTVYLQMNSLKPEDTAVYYCAADPASPAYGDYWGQGTQVTVSSGGGGSGGGGSGGGGSQVQLVESGGGLVQAGGSLRLSCAASGYIFGRNAMGWYRQAPGKERELVAGITRRGSITYYADSVKGRFTISRDNAKNTVYLQMNSLKPEDTAVYYCAADPASPAYGDYWGQGTQVTVSSGGGGSGGGGSGGGGSQVQLVESGGGLVQAGGSLRLSCAASGYIFGRNAMGWYRQAPGKERELVAGITRRGSITYYADSVKGRFTISRDNAKNTVYLQMNSLKPEDTAVYYCAADPASPAYGDYWGQGTQVTVSS

SEQ ID NO: 620 - protein, 397 aa, Artificial Sequence
  Synthetic sequence of highlighted MASC protein
QVQLVESGGGLVQAGGSLRLSCAASGYIFGRNAMGWYRQAPGKERELVAGITRRGSITYYADSVKGRFTISRDNAKNTVYLQMNSLKPEDTAVYYCAADPASPAYGDYWGQGTQVTVSSGGGGSGGGGSGGGGSGGGGSQVQLVESGGGLVQAGGSLRLSCAASGYIFGRNAMGWYRQAPGKERELVAGITRRGSITYYADSVKGRFTISRDNAKNTVYLQMNSLKPEDTAVYYCAADPASPAYGDYWGQGTQVTVSSGGGGSGGGGSGGGGSGGGGSQVQLVESGGGLVQAGGSLRLSCAASGYIFGRNAMGWYRQAPGKERELVAGITRRGSITYYADSVKGRFTISRDNAKNTVYLQMNSLKPEDTAVYYCAADPASPAYGDYWGQGTQVTVSS

SEQ ID NO: 621 - protein, 119 aa, Artificial Sequence
  Synthetic sequence of highlighted MASC protein
EVQLVESGGGLVQPGGSLRLSCAASGIIFGRNAMGWYRQAPGKGLELVAGITRRGSITYYADSVKGRFTISRDNSKNTLYLQMNSLRAEDTAVYYCAADPASPAPGDYWGQGTQVTVSS

SEQ ID NO: 622 - protein, 253 aa, Artificial Sequence
  Synthetic sequence of highlighted MASC protein
EVQLVESGGGLVQPGGSLRLSCAASGIIFGRNAMGWYRQAPGKGLELVAGITRRGSITYYADSVKGRFTISRDNSKNTLYLQMNSLRAEDTAVYYCAADPASPAPGDYWGQGTQVTVSSGGGGSGGGGSGGGGSEVQLVESGGGLVQPGGSLRLSCAASGIIFGRNAMGWYRQAPGKGLELVAGITRRGSITYYADSVKGRFTISRDNSKNTLYLQMNSLRAEDTAVYYCAADPASPAPGDYWGQGTQVTVSS

SEQ ID NO: 623 - protein, 258 aa, Artificial Sequence
  Synthetic sequence of highlighted MASC protein
EVQLVESGGGLVQPGGSLRLSCAASGIIFGRNAMGWYRQAPGKGLELVAGITRRGSITYYADSVKGRFTISRDNSKNTLYLQMNSLRAEDTAVYYCAADPASPAPGDYWGQGTQVTVSSGGGGSGGGGSGGGGSGGGGSEVQLVESGGGLVQPGGSLRLSCAASGIIFGRNAMGWYRQAPGKGLELVAGITRRGSITYYADSVKGRFTISRDNSKNTLYLQMNSLRAEDTAVYYCAADPASPAPGDYWGQGTQVTVSS

SEQ ID NO: 624 - protein, 387 aa, Artificial Sequence
  Synthetic sequence of highlighted MASC protein
EVQLVESGGGLVQPGGSLRLSCAASGIIFGRNAMGWYRQAPGKGLELVAGITRRGSITYYADSVKGRFTISRDNSKNTLYLQMNSLRAEDTAVYYCAADPASPAPGDYWGQGTQVTVSSGGGGSGGGGSGGGGSEVQLVESGGGLVQPGGSLRLSCAASGIIFGRNAMGWYRQAPGKGLELVAGITRRGSITYYADSVKGRFTISRDNSKNTLYLQMNSLRAEDTAVYYCAADPASPAPGDYWGQGTQVTVSSGGGGSGGGGSGGGGSEVQLVESGGGLVQPGGSLRLSCAASGIIFGRNAMGWYRQAPGKGLELVAGITRRGSITYYADSVKGRFTISRDNSKNTLYLQMNSLRAEDTAVYYCAADPASPAPGDYWGQGTQVTVSS

SEQ ID NO: 625 - protein, 397 aa, Artificial Sequence
  Synthetic sequence of highlighted MASC protein
EVQLVESGGGLVQPGGSLRLSCAASGIIFGRNAMGWYRQAPGKGLELVAGITRRGSITYYADSVKGRFTISRDNSKNTLYLQMNSLRAEDTAVYYCAADPASPAPGDYWGQGTQVTVSSGGGGSGGGGSGGGGSGGGGSEVQLVESGGGLVQPGGSLRLSCAASGIIFGRNAMGWYRQAPGKGLELVAGITRRGSITYYADSVKGRFTISRDNSKNTLYLQMNSLRAEDTAVYYCAADPASPAPGDYWGQGTQVTVSSGGGGSGGGGSGGGGSGGGGSEVQLVESGGGLVQPGGSLRLSCAASGIIFGRNAMGWYRQAPGKGLELVAGITRRGSITYYADSVKGRFTISRDNSKNTLYLQMNSLRAEDTAVYYCAADPASPAPGDYWGQGTQVTVSS

SEQ ID NO: 626 - protein, 119 aa, Artificial Sequence; identical to SEQ ID NO: 80
  Synthetic sequence of highlighted MASC protein

SEQ ID NO: 627 - protein, 253 aa, Artificial Sequence; identical to SEQ ID NO: 83
  Synthetic sequence of highlighted MASC protein

SEQ ID NO: 628 - protein, 258 aa, Artificial Sequence; identical to SEQ ID NO: 84
  Synthetic sequence of highlighted MASC protein

SEQ ID NO: 629 - protein, 387 aa, Artificial Sequence
  Synthetic sequence of highlighted MASC protein
EVQLVESGGGLVQPGGSLRLSCAASGYIFGRNAMGWYRQAPGKGLELVAGITRRGSITYYADSVKGRFTISRDNSKNTLYLQMNSLRAEDTAVYYCAADPASPAYGDYWGQGTQVTVSSGGGGSGGGGSGGGGSEVQLVESGGGLVQPGGSLRLSCAASGYIFGRNAMGWYRQAPGKGLELVAGITRRGSITYYADSVKGRFTISRDNSKNTLYLQMNSLRAEDTAVYYCAADPASPAYGDYWGQGTQVTVSSGGGGSGGGGSGGGGSEVQLVESGGGLVQPGGSLRLSCAASGYIFGRNAMGWYRQAPGKGLELVAGIIRRGSITYYADSVKGRFTISRDNSKNTLYLQMNSLRAEDTAVYYCAADPASPAYGDYWGQGTQVTVSS

SEQ ID NO: 630 - protein, 397 aa, Artificial Sequence; identical to SEQ ID NO: 86
  Synthetic sequence of highlighted MASC protein

What is claimed is:

1. A composition comprising a single domain antigen binding domain (sdABD) that binds to the Spike protein having SEQ ID NO:300 or the sequence described in FIG. 17A, wherein said sdABD comprises, from N- to C-terminal, FR1-vhCDR1-FR2-vhCDR2-FR3-vhCDR3-FR, wherein said vhhCDR1, vhhCDR2 and said vhhCDR3 is selected from the sets depicted in FIG. 13, FIG. 15 and FIG. 25.

2. A composition according to claim 1 wherein said vhCDR1 has a sequence GI(I/Y/W/F/V/L)FGRNA, said vhCDR2 has a sequence TRR(G/H/Y/G/Q)SITY and said vhCDR3 has a sequence AADPA(S/V/L/I/T)PA(P/F/W/Y/L/V)GDY.

3. A composition according to claim 1 wherein said vhCDR1 has SEQ ID NO:5, said vhCDR2 has SEQ ID NO:6, and vhCDR3 has SEQ ID NO:7.

4. A composition according to claim 1 wherein said vhCDR1 has SEQ ID NO:8, said vhCDR2 has SEQ ID NO:9, and vhCDR3 has SEQ ID NO:10.

5. A composition according to claim 1 wherein said vhCDR1 has SEQ ID NO:11, said vhCDR2 has SEQ ID NO:12, and vhCDR3 has SEQ ID NO:13.

6. A composition according to claim 1 wherein said vhCDR1 has SEQ ID NO:14, said vhCDR2 has SEQ ID NO:15, and vhCDR3 has SEQ ID NO:16.

7. A composition according to claim 1 wherein said vhCDR1 has SEQ ID NO:17, said vhCDR2 has SEQ ID NO:18, and vhCDR3 has SEQ ID NO:19.

8. A composition according to claim 1 wherein said vhCDR1 has SEQ ID NO:20, said vhCDR2 has SEQ ID NO:21, and vhCDR3 has SEQ ID NO:22.

9. A composition according to claim 1 wherein said vhCDR1 has SEQ ID NO:23, said vhCDR2 has SEQ ID NO:24, and vhCDR3 has SEQ ID NO:25.

10. A composition according to claim 1 wherein said vhCDR1 has SEQ ID NO:26, said vhCDR2 has SEQ ID NO:27, and vhCDR3 has SEQ ID NO:28.

11. A composition according to claim 1 wherein said vhCDR1 has SEQ ID NO:29, said vhCDR2 has SEQ ID NO:30, and vhCDR3 has SEQ ID NO:31.

12. A composition according to claim 1 wherein said vhCDR1 has SEQ ID NO:32, said vhCDR2 has SEQ ID NO:33, and vhCDR3 has SEQ ID NO:34.

13. A composition according to claim 1 wherein said vhCDR1 has SEQ ID NO:35, said vhCDR2 has SEQ ID NO:36, and vhCDR3 has SEQ ID NO:37.

14. A composition according to claim 1 wherein said vhCDR1 has SEQ ID NO:38, said vhCDR2 has SEQ ID NO:39, and vhCDR3 has SEQ ID NO:40.

15. A composition according to claim 1 wherein said vhCDR1 has SEQ ID NO:41, said vhCDR2 has SEQ ID NO:42, and vhCDR3 has SEQ ID NO:43.

16. A composition according to claim 1 wherein said vhCDR1 has SEQ ID NO44:, said vhCDR2 has SEQ ID NO45:, and vhCDR3 has SEQ ID NO:46.

17. A composition according to claim 1 wherein said vhCDR1 has SEQ ID NO:47, said vhCDR2 has SEQ ID NO:48, and vhCDR3 has SEQ ID NO:49.

18. A composition according to claim 1 wherein said vhCDR1 has SEQ ID NO:50, said vhCDR2 has SEQ ID NO:51, and vhCDR3 has SEQ ID NO:52.

19. A composition according to claim 1 wherein said vhCDR1 has SEQ ID NO:53, said vhCDR2 has SEQ ID NO:54, and vhCDR3 has SEQ ID NO:55.

20. A composition according to claim 1 wherein said vhCDR1 has SEQ ID NO:56, said vhCDR2 has SEQ ID NO:57, and vhCDR3 has SEQ ID NO:58.

21. A composition according to claim 1 wherein said vhCDR1 has SEQ ID NO:59, said vhCDR2 has SEQ ID NO:60, and vhCDR3 has SEQ ID NO:61.

22. A composition according to claim 1 wherein said vhCDR1 has SEQ ID N062 said vhCDR2 has SEQ ID NO:63, and vhCDR3 has SEQ ID NO:64.

23. A composition according to claim 1 wherein said vhCDR1 has SEQ ID NO:65, said vhCDR2 has SEQ ID NO:66, and vhCDR3 has SEQ ID NO:67.

24. A composition according to claim 1 wherein said vhCDR1 has SEQ ID NO:68, said vhCDR2 has SEQ ID NO:69, and vhCDR3 has SEQ ID NO70:.

25. A composition according to claim 1 wherein said vhCDR1 has SEQ ID NO:71, said vhCDR2 has SEQ ID NO:72, and vhCDR3 has SEQ ID NO:73.

26. A composition according to claim 1 wherein said vhCDR1 has SEQ ID NO:74, said vhCDR2 has SEQ ID NO:75, and vhCDR3 has SEQ ID NO:76.

27. A composition according to any of claims 3 to 25 wherein the framework sequences of said sdABD have SEQ ID NO:1, SEQ ID NO:2, SEQ ID NO:3 and SEQ ID NO:4.

28. A composition according to any of claims 1 to 25 wherein said composition further comprises an half-life extension domain covalently attached to said sdABD using a domain linker.

29. A composition according to claim 26 wherein said half-life extension domain is selected from the group consisting of an anti-human serum albumin (HSA) sdABD and all or part of HSA.

30. A composition comprising a MASC fusion protein that binds to the Spike protein having SEQ ID NO: 300 or the sequence described in FIG. 17A, wherein said MASC fusion protein comprises, from N- to C-terminal, FR1-vhCDR1-FR2-vhCDR2-FR3-vhCDR3-FR-domain linker-FR1-vhCDR1-FR2-vhCDR2-FR3-vhCDR3-FR, wherein said vhhCDR1, vhhCDR2 and said vhhCDR3 is selected from the sets depicted in FIG. 13, FIG. 15 and FIG. 25.

31. A composition according to claim 30 wherein said vhCDR1 has a sequence GI(I/Y/W/F/V/L)FGRNA, said vhCDR2 has a sequence TRR(G/H/Y/G/Q)SITY and said vhCDR3 has a sequence AADPA(S/V/L/I/T)PA(P/F/W/Y/L/V)GDY.

32. A composition according to claim 30 wherein said vhCDR1 has SEQ ID NO:5, said vhCDR2 has SEQ ID NO:6, and vhCDR3 has SEQ ID NO:7.

33. A composition according to claim 30 wherein said vhCDR1 has SEQ ID NO:8, said vhCDR2 has SEQ ID NO:9, and vhCDR3 has SEQ ID NO:10.

34. A composition according to claim 30 wherein said vhCDR1 has SEQ ID NO:11, said vhCDR2 has SEQ ID NO:12, and vhCDR3 has SEQ ID NO:13.

35. A composition according to claim 30 wherein said vhCDR1 has SEQ ID NO:14, said vhCDR2 has SEQ ID NO:15, and vhCDR3 has SEQ ID NO:16.

36. A composition according to claim 30 wherein said vhCDR1 has SEQ ID NO:17, said vhCDR2 has SEQ ID NO:18, and vhCDR3 has SEQ ID NO:19.

37. A composition according to claim 30 wherein said vhCDR1 has SEQ ID NO:20, said vhCDR2 has SEQ ID NO:21, and vhCDR3 has SEQ ID NO:22.

38. A composition according to claim 30 wherein said vhCDR1 has SEQ ID NO:23, said vhCDR2 has SEQ ID NO:24, and vhCDR3 has SEQ ID NO:25.

39. A composition according to claim 30 wherein said vhCDR1 has SEQ ID NO:26, said vhCDR2 has SEQ ID NO:27, and vhCDR3 has SEQ ID NO:28.

40. A composition according to claim 30 wherein said vhCDR1 has SEQ ID NO:29, said vhCDR2 has SEQ ID NO:30, and vhCDR3 has SEQ ID NO:31.

41. A composition according to claim 30 wherein said vhCDR1 has SEQ ID NO:32, said vhCDR2 has SEQ ID NO:33, and vhCDR3 has SEQ ID NO:34.

42. A composition according to claim 30 wherein said vhCDR1 has SEQ ID NO:35, said vhCDR2 has SEQ ID NO:36, and vhCDR3 has SEQ ID NO:37.

43. A composition according to claim 30 wherein said vhCDR1 has SEQ ID NO:38, said vhCDR2 has SEQ ID NO:39, and vhCDR3 has SEQ ID NO:40.

44. A composition according to claim 30 wherein said vhCDR1 has SEQ ID NO:41, said vhCDR2 has SEQ ID NO:42, and vhCDR3 has SEQ ID NO:43.

45. A composition according to claim 30 wherein said vhCDR1 has SEQ ID NO44:, said vhCDR2 has SEQ ID NO45:, and vhCDR3 has SEQ ID NO:46.

46. A composition according to claim 30 wherein said vhCDR1 has SEQ ID NO:47, said vhCDR2 has SEQ ID NO:48, and vhCDR3 has SEQ ID NO:49.

47. A composition according to claim 30 wherein said vhCDR1 has SEQ ID NO:50, said vhCDR2 has SEQ ID NO:51, and vhCDR3 has SEQ ID NO:52.

48. A composition according to claim 30 wherein said vhCDR1 has SEQ ID NO:53, said vhCDR2 has SEQ ID NO:54, and vhCDR3 has SEQ ID NO:55.

49. A composition according to claim 30 wherein said vhCDR1 has SEQ ID NO:56, said vhCDR2 has SEQ ID NO:57, and vhCDR3 has SEQ ID NO:58.

50. A composition according to claim 30 wherein said vhCDR1 has SEQ ID NO:59, said vhCDR2 has SEQ ID NO:60, and vhCDR3 has SEQ ID NO:61.

51. A composition according to claim 30 wherein said vhCDR1 has SEQ ID NO62 said vhCDR2 has SEQ ID NO:63, and vhCDR3 has SEQ ID NO:64.

52. A composition according to claim 30 wherein said vhCDR1 has SEQ ID NO:65, said vhCDR2 has SEQ ID NO:66, and vhCDR3 has SEQ ID NO:67.

53. A composition according to claim 30 wherein said vhCDR1 has SEQ ID NO:68, said vhCDR2 has SEQ ID NO:69, and vhCDR3 has SEQ ID NO70:.

54. A composition according to claim 30 wherein said vhCDR1 has SEQ ID NO:71, said vhCDR2 has SEQ ID NO:72, and vhCDR3 has SEQ ID NO:73.

55. A composition according to claim 30 wherein said vhCDR1 has SEQ ID NO:74, said vhCDR2 has SEQ ID NO:75, and vhCDR3 has SEQ ID NO:76.

56. A composition according to any of claims 32 to 54 wherein the framework sequences of said sdABD have SEQ ID NO:1, SEQ ID NO:2, SEQ ID NO:3 and SEQ ID NO:4.

57. A composition according to any of claims 30 to 54 wherein said composition further comprises an half-life extension domain covalently attached to said sdABD using a domain linker.

58. A composition according to claim 55 wherein said half-life extension domain is selected from the group consisting of an anti-human serum albumin (HSA) sdABD and all or part of HSA.

59. A composition comprising a MASC fusion protein that binds to the Spike protein having SEQ ID NO: 300 or the sequence described in FIG. 17A, wherein said MASC fusion protein comprises, from N- to C-terminal, FR1-vhCDR1-FR2-vhCDR2-FR3-vhCDR3-FR-domain linker-FR1-vhCDR1-FR2-vhCDR2-FR3-vhCDR3-FR-domain linker-FR1-vhCDR1-FR2-vhCDR2-FR3-vhCDR3-FR, wherein said vhhCDR1, vhhCDR2 and said vhhCDR3 is selected from the sets depicted in FIG. 13, FIG. 15 and FIG. 25.

60. A composition according to claim 59 wherein said vhCDR1 has a sequence GI(I/Y/W/F/V/L)FGRNA, said vhCDR2 has a sequence TRR(G/H/Y/G/Q)SITY and said vhCDR3 has a sequence AADPA(S/V/L/I/T)PA(P/F/W/Y/L/V)GDY.

61. A composition according to claim 59 wherein said vhCDR1 has SEQ ID NO:5, said vhCDR2 has SEQ ID NO:6, and vhCDR3 has SEQ ID NO:7.

62. A composition according to claim 59 wherein said vhCDR1 has SEQ ID NO:8, said vhCDR2 has SEQ ID NO:9, and vhCDR3 has SEQ ID NO:10.

63. A composition according to claim 59 wherein said vhCDR1 has SEQ ID NO:11, said vhCDR2 has SEQ ID NO:12, and vhCDR3 has SEQ ID NO:13.

64. A composition according to claim 59 wherein said vhCDR1 has SEQ ID NO:14, said vhCDR2 has SEQ ID NO:15, and vhCDR3 has SEQ ID NO:16.

65. A composition according to claim 59 wherein said vhCDR1 has SEQ ID NO:17, said vhCDR2 has SEQ ID NO:18, and vhCDR3 has SEQ ID NO:19.

66. A composition according to claim 59 wherein said vhCDR1 has SEQ ID NO:20, said vhCDR2 has SEQ ID NO:21, and vhCDR3 has SEQ ID NO:22.

67. A composition according to claim 59 wherein said vhCDR1 has SEQ ID NO:23, said vhCDR2 has SEQ ID NO:24, and vhCDR3 has SEQ ID NO:25.

68. A composition according to claim 59 wherein said vhCDR1 has SEQ ID NO:26, said vhCDR2 has SEQ ID NO:27, and vhCDR3 has SEQ ID NO:28.

69. A composition according to claim 59 wherein said vhCDR1 has SEQ ID NO:29, said vhCDR2 has SEQ ID NO:30, and vhCDR3 has SEQ ID NO:31.

70. A composition according to claim 59 wherein said vhCDR1 has SEQ ID NO:32, said vhCDR2 has SEQ ID NO:33, and vhCDR3 has SEQ ID NO:34.

71. A composition according to claim 59 wherein said vhCDR1 has SEQ ID NO:35, said vhCDR2 has SEQ ID NO:36, and vhCDR3 has SEQ ID NO:37.

72. A composition according to claim 59 wherein said vhCDR1 has SEQ ID NO:38, said vhCDR2 has SEQ ID NO:39, and vhCDR3 has SEQ ID NO:40.

73. A composition according to claim 59 wherein said vhCDR1 has SEQ ID NO:41, said vhCDR2 has SEQ ID NO:42, and vhCDR3 has SEQ ID NO:43.

74. A composition according to claim 59 wherein said vhCDR1 has SEQ ID NO44:, said vhCDR2 has SEQ ID NO45:, and vhCDR3 has SEQ ID NO:46.

75. A composition according to claim 59 wherein said vhCDR1 has SEQ ID NO:47, said vhCDR2 has SEQ ID NO:48, and vhCDR3 has SEQ ID NO:49.

76. A composition according to claim 59 wherein said vhCDR1 has SEQ ID NO:50, said vhCDR2 has SEQ ID NO:51, and vhCDR3 has SEQ ID NO:52.

77. A composition according to claim 59 wherein said vhCDR1 has SEQ ID NO:53, said vhCDR2 has SEQ ID NO:54, and vhCDR3 has SEQ ID NO:55.

78. A composition according to claim 59 wherein said vhCDR1 has SEQ ID NO:56, said vhCDR2 has SEQ ID NO:57, and vhCDR3 has SEQ ID NO:58.

79. A composition according to claim 59 wherein said vhCDR1 has SEQ ID NO:59, said vhCDR2 has SEQ ID NO:60, and vhCDR3 has SEQ ID NO:61.

80. A composition according to claim 59 wherein said vhCDR1 has SEQ ID N062 said vhCDR2 has SEQ ID NO:63, and vhCDR3 has SEQ ID NO:64.

81. A composition according to claim 59 wherein said vhCDR1 has SEQ ID NO:65, said vhCDR2 has SEQ ID NO:66, and vhCDR3 has SEQ ID NO:67.

82. A composition according to claim 59 wherein said vhCDR1 has SEQ ID NO:68, said vhCDR2 has SEQ ID NO:69, and vhCDR3 has SEQ ID NO70.

83. A composition according to claim 59 wherein said vhCDR1 has SEQ ID NO:71, said vhCDR2 has SEQ ID NO:72, and vhCDR3 has SEQ ID NO:73.

84. A composition according to claim 59 wherein said vhCDR1 has SEQ ID NO:74, said vhCDR2 has SEQ ID NO:75, and vhCDR3 has SEQ ID NO:76.

85. A composition according to any of claims 61 to 83 wherein the framework sequences of said sdABD have SEQ ID NO:1, SEQ ID NO:2, SEQ ID NO:3 and SEQ ID NO:4.

86. A composition according to any of claims 59 to 83 wherein said composition further comprises an half-life extension domain covalently attached to said sdABD using a domain linker.

87. A composition according to claim 84 wherein said half-life extension domain is selected from the group consisting of an anti-human serum albumin (HSA) sdABD and all or part of HSA.

88. A nucleic acid encoding the composition of any of claims 1 to 29, 30 to 58 and 59 to 87.

89. An expression vector comprising the nucleic acid of claim 88.

90. A host cell comprising the expression vector of claim 60.

91. A method of making a composition according to any of claims 1 to 29, 30 to 58 and 59 to 87 comprising culturing the host cell of claim 90 under conditions whereby said composition is expressed and recovering said composition.

92. A method of treating or preventing an infection by SARS-CoV2 virus comprising administering to a human the composition of any of claims 1 to 29, 30 to 58 and 59 to 87, thereby treating or preventing said infection.

93. A method of neutralizing the SARS-CoV2 virus comprising administering to a human the composition of any of claims 1 to 29, 30 to 58 and 59 to 87, thereby neutralizing said virus.

94. A method according to claim 92 or 93 wherein said administration comprises intraveneous administration.

95. A method according to claim 92 or 93 wherein said administration comprises nasal administration.

96. A method according to claim 92 or 93 wherein said administration comprises inhalation.

97. A method according to claim 96 wherein said inhalation is achieved using a nebulizer.

98. A lyophilized composition comprising a MASC protein of any of claims 1 to 29, 30 to 58 and 59 to 87.

99. A composition comprising an antigen binding domain (ABD) that that binds to the trimeric Spike protein, each monomer of the Spike protein having SEQ ID NO: 300 or the sequence described in FIG. 17A, wherein said ABD binds to a first epitope of a first monomer and binds to a second epitope of a second monomer.

100. A composition according to claim 99 where said first epitope comprises residues 446, 447, 449, 453, 455, 456, 483-486, 489-490, 493-496, 498, 501, and 505 within the ACE2 binding region of the SC2 spike RBD and said second epitope comprises residues 342, 343, 367, 371-375, 404, 436-441.

101. A composition comprising an ABD that binds to the trimeric Spike protein, each monomer of the Spike protein having SEQ ID NO: 300 or the sequence described in FIG. 17A, wherein said binding results in the RBD of said Spike protein being locked into the non-extended position.
